(19) United States
(12) Patent Application Publication
(10) Pub. No.: US 2025/0127169 A1
(43) Pub. Date: Apr. 24, 2025

(54) PLANTS HAVING INCREASED TOLERANCE TO HERBICIDES

(71) Applicant: BASF Agricultural Solutions Seed US LLC, Florham Park, NJ (US)

(72) Inventors: Manuel DUBALD, Morrisville, NC (US); Stefan JANSENS, Gent (BE); Chad M BENTON, Durham, NC (US); Aimone PORRI, Limburgerhof (DE); Tobias SEISER, Ludwigshafen am Rhein (DE); Thomas W. KLEVEN, Sabin, MN (US); Petrus OUWERKERK, Gent (BE); Alain SAILLAND, Morrisville, NC (US)

(21) Appl. No.: 18/689,022

(22) PCT Filed: Aug. 30, 2022
(86) PCT No.: PCT/EP2022/074026

§ 371 Date: Mar. 4, 2024

Related U.S. Application Data
(60) Provisional application No. 63/240,388, filed on Sep. 3, 2021.

(51) Int. Cl. A01N 43/54; A01P 13/00; C12N 9/02; C12N 15/82

(52) U.S. Cl. CPC A01N 43/54; A01P 13/00; C12N 9/001; C12N 15/8274; C12Y 103/03004

(57) ABSTRACT

The present invention refers to a method for controlling undesired vegetation at a plant cultivation site, the method comprising the steps of providing, at said site, a plant that comprises at least one nucleic acid comprising a nucleotide sequence encoding protoporphyrinogen oxidase (PPO) which is resistant or tolerant to a PPO-inhibiting herbicide by applying to said site an effective amount of said herbicide. The invention further refers to plants comprising wild-type or mutated PPO enzymes, and methods of obtaining such plants.

### FIELD OF THE INVENTION

[0001] The present invention relates in general to methods for conferring on plants agricultural level tolerance to herbicides. Particularly, the invention refers to plants having an increased tolerance to PPO-inhibiting herbicides. More specifically, the present invention relates to methods and plants obtained by mutagenesis and cross-breeding and transformation that have an increased tolerance to PPO-inhibiting herbicides.

### BACKGROUND OF THE INVENTION

[0002] Herbicides that inhibit protoporphyrinogen oxidase (hereinafter referred to as Protox or PPO; EC:1.3.3.4), a key enzyme in the biosynthesis of protoporphyrin IX, have been used for selective weed control since the 1960s. PPO catalyzes the last common step in chlorophyll and heme biosynthesis which is the oxidation of protoporphyrinogen IX to protoporphyrin IX. (Matringe et al. 1989. Biochem. 1. 260: 231). PPO-inhibiting herbicides include many different structural classes of molecules (Duke et al. 1991. Weed Sci. 39: 465; Nandihalli et al. 1992. Pesticide Biochem. Physiol. 43: 193; Matringe et al. 1989. FEBS Lett. 245: 35; Yanase and Andoh. 1989. Pesticide Biochem. Physiol. 35: 70). These herbicidal compounds include the diphenylethers {e.g. lactofen, (+−)-2-ethoxy-1-methyl-2-oxoethyl 5-{2-chloro-4-(trifluoromethyl)phenoxy}-2-nitrobenzoate; acifluorfen, 5-{2-chloro-4-(trifluoromethyl)phenoxy}-2-nitrobenzoic acid; its methyl ester; or oxyfluorfen, 2-chloro-1-(3-ethoxy-4-nitrophenoxy)-4-(trifluorobenzene)}, oxidiazoles, (e.g. oxidiazon, 3-{2,4-dichloro-5-(1-methylethoxy)phenyl}-5-(1,1-dimethylethyl)-1,3,4-oxadiazol-2-(3H)-one), cyclic imides (e.g. S-23142, N-(4-chloro-2-fluoro-5-propargyloxyphenyl)-3,4,5,6-tetrahydrophthalimide; chlorophthalim, N-(4-chlorophenyl)-3,4,5,6-tetrahydrophthalimide), phenyl pyrazoles (e.g. TNPP-ethyl, ethyl 2-{1-(2,3,4-trichlorophenyl)-4-nitropyrazolyl-5-oxy}propionate; M&B 39279), pyridine derivatives (e.g. LS 82-556), and phenopylate and its O-phenylpyrrolidino- and piperidinocarbamate analogs. Many of these compounds competitively inhibit the normal reaction catalyzed by the enzyme, apparently acting as substrate analogs.

[0003] Application of PPO-inhibiting herbicides results in the accumulation of protoporphyrinogen IX in the chloroplast and mitochondria, which is believed to leak into the cytosol where it is oxidized by a peroxidase. When exposed to light, protoporphyrin IX causes formation of singlet oxygen in the cytosol and the formation of other reactive oxygen species, which can cause lipid peroxidation and membrane disruption leading to rapid cell death (Lee et al. 1993. Plant Physiol. 102: 881).
[0004] 1. Not all PPO enzymes are sensitive to herbicides which inhibit plant PPO enzymes. Both the Escherichia coli and Bacillus subtilis PPO enzymes (Sasarmen et al. 1993. Can. J. Microbiol. 39: 1155; Dailey et al. 1994. J. Biol. Chem. 269: 813) are resistant to these herbicidal inhibitors. Mutants of the unicellular alga Chlamydomonas reinhardtii resistant to the phenylimide herbicide S-23142 have been reported (Kataoka et al. 1990. J. Pesticide Sci. 15: 449; Shibata et al. 1992. In Research in Photosynthesis, Vol. III, N. Murata, ed. Kluwer:Netherlands. pp. 567-70). At least one of these mutants appears to have an altered PPO activity that is resistant not only to the herbicidal inhibitor on which the mutant was selected, but also to other classes of protox inhibitors (Oshio et al. 1993. Z. Naturforsch. 48c: 339; Sato et al. 1994. In ACS Symposium on Porphyric Pesticides, S. Duke, ed. ACS Press: Washington, D.C.). A mutant tobacco cell line has also been reported that is resistant to the inhibitor S-21432 (Che et al. 1993. Z. Naturforsch. 48c: 350). Auxotrophic E. coli mutants have been used to confirm the herbicide resistance of cloned plant PPO-inhibiting herbicides.

[0005] Three main strategies are available for making plants tolerant to herbicides, i.e. (1) detoxifying the herbicide with an enzyme which transforms the herbicide, or its active metabolite, into non-toxic products, such as, for example, the enzymes for tolerance to bromoxynil or to basta (EP242236, EP337899); (2) mutating the target enzyme into a functional enzyme which is less sensitive to the herbicide, or to its active metabolite, such as, for example, the enzymes for tolerance to glyphosate (EP293356, Padgette S. R. et al., J. Biol. Chem., 266, 33, 1991); or (3) overexpressing the sensitive enzyme so as to produce quantities of the target enzyme in the plant which are sufficient in relation to the herbicide, in view of the kinetic constants of this enzyme, so as to have enough of the functional enzyme available despite the presence of its inhibitor. The third strategy was described for successfully obtaining plants which were tolerant to PPO inhibitors (see e.g. U.S. Pat. No. 5,767,373 or U.S. Pat. No. 5,939,602, and patent family members thereof.). In addition, US 2010/0100988 and WO 2007/024739 discloses nucleotide sequences encoding amino acid sequences having enzymatic activity such that the amino acid sequences are resistant to PPO inhibitor herbicidal chemicals, in particular 3-phenyluracil inhibitor specific PPO mutants.

[0006] WO 2012/080975 discloses plants the tolerance of which to a PPO-inhibiting herbicide named (1,5-dimethyl-6-thioxo-3-(2,2,7-trifluoro-3-oxo-4-(prop-2-ynyl)-3,4-dihydro-2H-benzo[b][1,4]oxazin-6-yl)-1,3,5-triazinane-2,4-dione) had been increased by transforming said plants with nucleic acids encoding mutated PPO mutated enzymes. In particular, WO 2012/080975 discloses that the introduction of nucleic acids which code for a mutated PPO of an Amaranthus type II PPO in which the Arginine at position 128 had been replaced by a leucine, alanine, or valine, and the phenylalanine at position 420 had been replaced by a methionine, cysteine, isoleucine, leucine, or threonine, confers increased tolerance/resistance to a benzoxazinone-derivative herbicide. WO 2013/189984 discloses plants the tolerance of which to PPO inhibitors had been increased by transforming said plants with nucleic acids encoding mutated PPO enzymes, in which the Leucine corresponding to position 397 of an Amaranthus type II PPO had been replaced, and the phenylalanine corresponding to position 420 of an Amaranthus type II PPO had been replaced. WO2015/022636 discloses plants the tolerance of which to PPO inhibitors had been increased by transforming said plants with nucleic acids encoding mutated PPO enzymes, in which the Arginine corresponding to position 128 of an Amaranthus type II PPO had been replaced, and the phenylalanine corresponding to position 420 of an Amaranthus type II PPO had been replaced, but the replacement occurred with amino acids, which are different from those disclosed in WO 2012/080975. WO2015/092706 describes PPO polypeptides from a plurality of organisms, which PPO polypeptides had been mutated to comprise the advantageous mutations employed for the Amaranthus type II PPO. WO2015/022640 discloses PPO polypeptides from Alopecurus myosuroides and mutants thereof, which confer tolerance to a broad spectrum of PPO inhibiting herbicides.

[0007] The inventors of the present invention have now surprisingly found that those types of mutants confer increased tolerance/resistance to a new class of PPO inhibitors, hereinafter described as phenyluracils or phenyluracil herbicides. Thus, to date, the prior art has not described phenyluracil tolerant plants containing a mutated PPO nucleic acid according to the present invention, which are tolerant/resistant to a broad selection of phenyluracils. Therefore, what is needed in the art are crop plants and crop plants having increased tolerance to phenyluracils and containing at least one wildtype and/or mutated PPO nucleic acid according to the present invention. Also needed are methods for controlling weed growth in the vicinity of such crop plants or crop plants. These compositions and methods would allow for the use of spray over techniques when applying herbicides to areas containing crop plants or crop plants.

### SUMMARY OF THE INVENTION

[0008] The problem is solved by the present invention which refers to a method for controlling undesired vegetation at a plant cultivation site, the method comprising the steps of:
[0009] a) providing, at said site, a plant that comprises at least one nucleic acid comprising a nucleotide sequence encoding a protoporphyrinogen oxidase (PPO) polypeptide which is resistant or tolerant to a “PPO inhibiting herbicide”;
[0010] b) applying to said site an effective amount of said herbicide, wherein the PPO inhibiting herbicide is a phenyluracil of formula (I)

[chemical structure]

[0011] wherein the substituents have the following meanings:
   [0012] R¹ hydrogen, NH₂, C₁-C₆-alkyl or C₃-C₆-alkynyl;
   [0013] R² hydrogen, C₁-C₆-alkyl or C₁-C₆-haloalkyl;
   [0014] R³ hydrogen or C₁-C₆-alkyl;
   [0015] R⁴ H or halogen;
   [0016] R⁵ halogen, CN, C₁-C₃-haloalkyl, C₁-C₃-alkoxy, C₁-C₃-haloalkoxy, C₁-C₃-alkylthio, (C₁-C₃-alkyl)amino, di(C₁-C₃-alkyl)amino, C₁-C₃-alkoxy-C₁-C₃-alkyl, C₁-C₃-alkoxycarbonyl;
   [0017] R⁶ H, halogen, C₁-C₃-alkyl, C₁-C₃-alkoxy;
   [0018] R⁷ OR⁸, SR⁸, NR⁹R¹⁰, NR⁸OR⁹, NR⁸S(O)₂R⁹ or NR⁸S(O)₂NR⁹R¹⁰, wherein
      [0019] R⁸ is hydrogen, C₁-C₆-alkyl, C₃-C₆-alkenyl, C₃-C₆-alkynyl, C₁-C₆-haloalkyl, C₃-C₆-haloalkenyl, C₃-C₆-haloalkynyl, C₁-C₆-cyanoalkyl, C₁-C₆-alkoxy-C₁-C₆-alkyl, C₁-C₆-alkoxy-C₁-C₆-alkoxy-C₁-C₆-alkyl, di(C₁-C₆-alkoxy)C₁-C₆-alkyl, C₁-C₆-halo-alkoxy-C₁-C₆-alkyl, C₃-C₆-alkenyloxy-C₁-C₆-alkyl, C₃-C₆-haloalkenyloxy-C₁-C₆-alkyl, C₃-C₆-alkenyloxy-C₁-C₆-alkoxy-C₁-C₆-alkyl, C₁-C₆-alkylthio-C₁-C₆-alkyl, C₁-C₆-alkylsulfinyl-C₁-C₆-alkyl, C₁-C₆-alkylsulfonyl-C₁-C₆-alkyl, C₁-C₆-alkylcarbonyl-C₁-C₆-alkyl, C₁-C₆-alkoxycarbonyl-C₁-C₆-alkyl, C₁-C₆-haloalkoxycarbonyl-C₁-C₆-alkyl, C₃-C₆-alkenyloxycarbonyl-C₁-C₆-alkyl, C₃-C₆-alkynyloxycarbonyl-C₁-C₆-alkyl, amino, (C₁-C₆-alkyl)amino, di(C₁-C₆-alkyl)amino, (C₁-C₆-alkylcarbonyl)amino, amino-C₁-C₆-alkyl, (C₁-C₆-alkyl)amino-C₁-C₆-alkyl, di(C₁-C₆-alkyl)amino-C₁-C₆-alkyl, aminocarbonyl-C₁-C₆-alkyl, (C₁-C₆-alkyl)aminocarbonyl-C₁-C₆-alkyl, di(C₁-C₆-alkyl)aminocarbonyl-C₁-C₆-alkyl,
      [0020] —N═CR¹¹R¹², wherein R¹¹ and R¹² independently of one another are H, C₁-C₄-alkyl or phenyl;
      [0021] C₃-C₆-cycloalkyl, C₃-C₆-cycloalkyl-C₁-C₆-alkyl, C₃-C₆-heterocyclyl, C₃-C₆-heterocyclyl-C₁-C₆-alkyl, phenyl, phenyl-C₁-C₄-alkyl or a 5- or 6 membered heteroaryl,
         [0022] wherein each cycloalkyl, heterocyclyl, phenyl or heteroaryl ring can be substituted by one to four substituents selected from R¹³ or a 3- to 7-membered carbocyclus,
         which carbocyclus optionally has in addition to carbon atoms one or two ring members selected from the group consisting of
         —N(R¹¹)—, —N═N—, —C(═O)—, —O— and —S—, and which carbocyclus is optionally substituted with one to four substituents selected from R¹³;
         wherein R¹³ is halogen, NO₂, CN, C₁-C₄-alkyl, C₁-C₄-haloalkyl, C₁-C₄-alkoxy or C₁-C₄-alkoxycarbonyl;
      [0023] R⁹, R¹⁰ independently of one another are R⁸, or together form a 3- to 7-membered carbocyclus,
         [0024] which carbocyclus optionally has in addition to carbon atoms one or two ring members selected from the group consisting of —N(R¹¹)—, —N═N—, —C(═O)—, —O— and —S—, and
         [0025] which carbocyclus is optionally substituted with one to four substituents selected from R¹³;
   [0026] n 1 to 3;
   [0027] Q CH₂, O, S, SO, SO₂, NH or (C₁-C₃-alkyl)N;
   [0028] W O or S;
   [0029] X NH, NCH₃, O or S;
   [0030] Y O or S;
   [0031] Z phenyl, pyridyl, pyridazinyl, pyrimidinyl or pyrazinyl,
      [0032] each of which is optionally substituted by 1 to 4 substituents selected from the group consisting of halogen, CN, C₁-C₆-alkyl, C₁-C₆-haloalkyl, C₁-C₆-alkoxy, C₁-C₆-haloalkoxy;
   [0033] including their agriculturally acceptable salts, amides, esters or thioesters, provided the phenyluracils of formula (I) have a carboxyl group
[0034] and wherein the effective amount of said herbicide does not kill or inhibit the growth of the herbicide-tolerant plant of a).

[0035] In one embodiment, the herbicide resistant or tolerant PPO polypeptide comprises one or more of the following motifs 1, 2, and/or 3:
[0036] a. Motif 1: SQ[N/K/H]KRYI, wherein the Arg at position 5 within said motif is substituted by any other amino acid;
[0037] b. Motif 2: TLGTLFSS, wherein the Leu at position 2, and/or the Gly at position 3, and/or the Leu at position 5 within said motif is substituted by any other amino acid;
[0038] c. Motif 3: [F/Y]TTF[V/I]GG, wherein the Phe at position 4 within said motif is substituted by any other amino acid.

[0039] In another embodiment, the herbicide resistant or tolerant PPO polypeptide comprises a variant of the amino acid sequence of SEQ ID NO: 1, 2, 3, 4, 5, 6, 7, 8, 9, 10, 11, 12, 13, 14, 15, 16, 17, 18, 19, 20, 21, 22, 23, 24, 25, 26, 27, 28, 29, 30, 31, 32, 33, 34, 35, 36, 37, 38, 39, 40, 41, 42, 43, 44, 45, 46, 47, 48, 49, 50, 51, 52, 53, 54, 55, 56, 57, 58, 59, 60, 61, 62, 63, 64, 65, 66, 67, 68, 69, 70, 71, 72, 73, 74, 75, 76, 77, 78, 79, 80, 81, 82, 83, 84, 85, 86, 87, 88, 89, 90, 91, 92, 93, 94, 95, 96, 97, 98, 99, 100, 101, 102, 103, 104, 105, 106, 107, 108, 109, 110, 111, 112, 113, 114, 115, 116, 117, 577, 579, 581, 583, 585, 587, 589, 591, 593, 595, 597, 599, 601, 603, 605, 607, 609, 611, 613, 615, 617, 619, 621, 623, 625, 627, or 637, which variant comprises one or more of the following substitutions:
[0040] a. the amino acid corresponding to Arg128 of SEQ ID NO: 1 is substituted by any other amino acid.
[0041] b. The amino acid corresponding to Gly211 of SEQ ID NO: 1 is substituted by any other amino acid
[0042] c. the amino acid corresponding to Leu397 of SEQ ID NO: 1 is substituted by any other amino acid.
[0043] d. the amino acid corresponding to Gly398 of SEQ ID NO: 1 is substituted by any other amino acid
[0044] e. the amino acid corresponding to Leu400 of SEQ ID NO: 1 is substituted by any other amino acid
[0045] f. the amino acid corresponding to Phe420 of SEQ ID NO: 1 is substituted by any other amino acid.

[0046] In still another embodiment, the herbicide resistant or tolerant PPO polypeptide comprises the amino acid sequence of SEQ ID NO: 265, 266, 267, 268, 269, 270, 271, 272, 273, 274, 275, 276, 277, 278, 279, 280, 281, 282, 283, 284, 285, 286, 287, 288, 289, 290, 291, 292, 293, 294, 295, 296, 297, 298, 299, 300, 301, 302, 303, 304, 305, 306, 307, 308, 309, 310, 311, 312, 313, 314, 315, 316, 317, 318, 319, 320, 321, 322, 323, 324, 325, 326, 327328, 329, 330, 331, 332, 333, 334, 335, 336, 337, 338, 339, 340, 341, 342, 343, 344, 345, 346, 347, 348, 349, 350, 351, 352, 353, 354, 355, 356, 357, 358, 359, 360, 361, 362, 363, 364, 365, 366, 367, 368, 369, 370, 371, 372, 373, 374, 375, 376, 377, 378, 379, 380, 381, 382, 383, 384, 385, 386, 387, 388, 389, 390, 391, 392, 393, 394, 395, 396, 397, 398, 399, 400, 401, 402, 403, 404, 405, 406, 407, 408, 409, 410, 411, 412, 413, 414, 415, 416, 417, 418, 419, 420, 421, 422, 423, 424, 425, 426, 427, 428, 429, 430, 431, 432, 433, 434, 435, 436, 437, 438, 439, 440, 441, 442, 443, 444, 445, 446, 447, 448, 449, 450, 451, 452, 453, 454, 455, 456, 457, 458, 459, 460, 461, 462, 463, 464, 465, 466, 467, 468, 469, 470, 471, 472, 473, 474, 475, 476, 477, 478, 479, 480, 481, 482, 483, 484, 485, 486, 487, 488, 489, 490, 491, 492, 493, 494, 495, 496, 497, 498, 499, 500, 501, 502, 503, 504, 505, 506, 507, 508, 509, 510, 511, 512, 513, 514, 515, 516, 517, 518, 519, 520, 521, 522, 523, 524, 525, 526, 527, 528, 529, 530, 531, 532, 533, 534, 535, 536, 537, 538, 539, 540, 541, 542, 543, 544, 545, 546, 547, 548, 549, 550, 551, 552, 553, 554, 555, 556, 557, 558, 559, 560, 561, 562, 563, 564, 565, 651; 652; 653; 654; 655; 656; 657; 658; 659; 660; 661; 662; 663; 664; 665; 666; 667; 668; 669; 670; 671, 714; 715; 716; 717; 718; 719; 720; 721; 722; 723; 724; 725; 726; 727; 728; 729; 730; 731; 732; 733; 734; 735; 736; 737; 738, 795, 882, 883, 884, 885, 886, 887, 888, 889, 890, 891, 892, 893, 894, 895, 896, 897, 898, 899, 900, 901, 902, 903, 904, 905, 906, 907, 908, 909, 910, 911, 912, 913, 914, 915, 916, 917, 918, 919, 920, 921, 922, 923, 924, 925, 926, 927, 928, 929, 930, 931, 932, 933, 934, 935, 936, 937, 938, 939, 940, 941, 942, 943, 944, 945, 946, 947, 948, 949, 950, 951, 952, 953, 954, 955, 956, 957, 958, 959, 960, or a variant or homologue thereof.

[0047] In still another embodiment, the herbicide resistant or tolerant PPO polypeptide comprises the amino acid sequence of SEQ ID NO: 240, 241, 242, 243, 244, 245, 246, 247, 248, 249, 250, 251, 252, 253, 254, 255, 256, 257, 258, 259, 260, 261, 262, or 264.

[0048] Another object refers to a method of identifying a nucleotide sequence encoding a mutated PPO which is resistant or tolerant to a phenyluracil herbicide, the method comprising:
[0049] a) generating a library of mutated PPO-encoding nucleic acids,
[0050] b) screening a population of the resulting mutated PPO-encoding nucleic acids by expressing each of said nucleic acids in a cell or plant and treating said cell or plant with a phenyluracil,
[0051] c) comparing the phenyluracil herbicide-tolerance levels provided by said population of mutated PPO encoding nucleic acids with the phenyluracil-tolerance level provided by a control PPO-encoding nucleic acid,
[0052] d) selecting at least one mutated PPO-encoding nucleic acid that provides a significantly increased level of tolerance to a phenyluracil as compared to that provided by the control PPO-encoding nucleic acid.

[0053] In a preferred embodiment, the mutated PPO-encoding nucleic acid selected in step d) provides at least 2-fold as much tolerance to a phenyluracil as compared to that provided by the control PPO-encoding nucleic acid.

[0054] The resistance or tolerance can be determined by generating a transgenic plant comprising a nucleic acid sequence of the library of step a) and comparing said transgenic plant with a control plant.

[0055] Another object refers to a method of identifying a plant or algae containing a nucleic acid encoding a mutated PPO which is resistant or tolerant to a phenyluracil, the method comprising:
[0056] a) identifying an effective amount of a phenyluracil in a culture of plant cells or green algae.
[0057] b) treating said plant cells or green algae with a mutagenizing agent,
[0058] c) contacting said mutagenized cells population with an effective amount of phenyluracil herbicide, identified in a),
[0059] d) selecting at least one cell surviving these test conditions,
[0060] e) PCR-amplification and sequencing of PPO genes from cells selected in d) and comparing such sequences to wild-type PPO gene sequences, respectively.

[0061] In a preferred embodiment, the mutagenizing agent is ethylmethanesulfonate.

[0062] In another embodiment, the invention refers to a plant cell transformed by and expressing a wild-type or a mutated PPO nucleic acid according to the present invention or a plant which has been mutated to obtain a plant expressing, preferably over-expressing a wild-type or a mutated PPO nucleic acid according to the present invention, wherein expression of said nucleic acid in the plant cell results in increased resistance or tolerance to a phenyluracil as compared to a wild type variety of the plant cell.

[0063] In another embodiment, the invention refers to a plant that expresses a mutagenized or recombinant mutated PPO polypeptide, and wherein said mutated PPO confers upon the plant increased phenyluracil tolerance as compared to the corresponding wild-type variety of the plant when expressed therein.

[0064] In another embodiment, the invention refers to a plant comprising a plant cell according to the present invention, wherein expression of the nucleic acid in the plant results in the plant's increased resistance to phenyluracil herbicide as compared to a wild type variety of the plant.

[0065] The plants of the present invention can be transgenic or non-transgenic.

[0066] Preferably, the expression of the nucleic acid of the invention in the plant results in the plant's increased resistance to phenyluracil herbicides as compared to a wild type variety of the plant.

[0067] In another embodiment, the invention refers to a method for growing the plant according to the present invention while controlling weeds in the vicinity of said plant, said method comprising the steps of:
[0068] a) growing said plant, and
[0069] b) applying a herbicide composition comprising a phenyluracil herbicide to the plant and weeds, wherein the herbicide normally inhibits protoporphyrinogen oxidase, at a level of the herbicide that would inhibit the growth of a corresponding wild-type plant.

[0070] In another embodiment, the invention refers to a seed produced by a transgenic plant comprising a plant cell of the present invention, or to a seed produced by the non-transgenic plant that expresses a mutagenized PPO polypeptide, wherein the seed is true breeding for an increased resistance to a phenyluracil herbicide as compared to a wild type variety of the seed.

[0071] In another embodiment, the invention refers to a method of producing a transgenic plant cell with an increased resistance to a phenyluracil herbicide as compared to a wild type variety of the plant cell comprising, transforming the plant cell with an expression cassette comprising a wild-type or a mutated PPO nucleic acid.

[0072] In another embodiment, the invention refers to a method of producing a transgenic plant comprising, (a) transforming a plant cell with an expression cassette comprising a wild-type or a mutated PPO nucleic acid, and (b) generating a plant with an increased resistance to phenyluracil herbicide from the plant cell.

[0073] Preferably, the expression cassette further comprises a transcription initiation regulatory region and a translation initiation regulatory region that are functional in the plant.

[0074] In another embodiment, the invention relates to using the mutated PPO of the invention as selectable marker. The invention provides a method of identifying or selecting a transformed plant cell, plant tissue, plant or part thereof comprising a) providing a transformed plant cell, plant tissue, plant or part thereof, wherein said transformed plant cell, plant tissue, plant or part thereof comprises an isolated nucleic acid encoding a mutated PPO polypeptide of the invention as described hereinafter, wherein the polypeptide is used as a selection marker, and wherein said transformed plant cell, plant tissue, plant or part thereof may optionally comprise a further isolated nucleic acid of interest; b) contacting the transformed plant cell, plant tissue, plant or part thereof with at least one PPO-inhibiting inhibiting compound; c) determining whether the plant cell, plant tissue, plant or part thereof is affected by the inhibitor or inhibiting compound; and d) identifying or selecting the transformed plant cell, plant tissue, plant or part thereof.

[0075] The invention is also embodied in purified mutated PPO proteins that contain the mutations described herein, which are useful in molecular modeling studies to design further improvements to herbicide tolerance. Methods of protein purification are well known, and can be readily accomplished using commercially available products or specially designed methods, as set forth for example, in Protein Biotechnology, Walsh and Headon (Wiley, 1994).

[0076] In another embodiment, the invention relates to a combination useful for weed control, comprising (a) a polynucleotide encoding a mutated PPO polypeptide according to the present invention, which polynucleotide is capable of being expressed in a plant to thereby provide to that plant tolerance to a phenyluracil herbicide; and (b) a phenyluracil herbicide.

[0077] In another embodiment, the invention relates to a process for preparing a combination useful for weed control comprising (a) providing a polynucleotide encoding a mutated PPO polypeptide according to the present invention, which polynucleotide is capable of being expressed in a plant to thereby provide to that plant tolerance to a phenyluracil herbicide; and (b) providing a phenyluracil herbicide.

[0078] In a preferred embodiment, said step of providing a polynucleotide comprises providing a plant containing the polynucleotide.

[0079] In another preferred embodiment, said step of providing a polynucleotide comprises providing a seed containing the polynucleotide.

[0080] In another preferred embodiment, said process further comprises a step of applying the phenyluracil herbicide to the seed.

[0081] In another embodiment, the invention relates to the use of a combination useful for weed control, comprising (a) a polynucleotide encoding a mutated PPO polypeptide according to the present invention, which polynucleotide is capable of being expressed in a plant to thereby provide to that plant tolerance to a phenyluracil herbicide; and (b) a phenyluracil herbicide, to control weeds at a plant cultivation site.

### BRIEF DESCRIPTION OF THE DRAWINGS

[0082] pBas05425
[0083] SEQ ID NO: 661; codon-optimized for soybean; and fused to the chloroplast targeting peptide of PPO1, derived from Camelina sativa;
[0084] pBas05426
[0085] SEQ ID NO: 661; codon-optimized for soybean; and fused to the mitochondria/chloroplast dual targeting peptide of PPO2, derived from Amaranthus tuberculatus;
[0086] pBas05427
[0087] SEQ ID NO: 661; in which the Arginine at position 129 is substituted by Glutamine; codon-optimized for soybean; and fused to the chloroplast targeting peptide of PPO1,
[0088] pBas05428
[0089] SEQ ID NO: 665; codon-optimized for soybean; and fused to the chloroplast targeting peptide of PPO1, derived from Camelina sativa;

[0090] FIG. 1 shows herbicide damage in percentage of individual Glycine max transformants three days after sprayment with 12.5 g a.i./ha methyl 2-[2-[2-bromo-4-fluoro-5-[3-methyl-2,6-dioxo-4-(trifluoromethyl)pyrimidin-1-yl]phenoxy]phenoxy]-2-methoxy-acetate

[0091] FIG. 2 shows herbicide damage in percentage of individual Glycine max transformants three days after sprayment with 4 g a.i./ha methyl 2-[2-[2-bromo-4-fluoro-5-[3-methyl-2,6-dioxo-4-(trifluoromethyl)pyrimidin-1-yl]phenoxy]phenoxy]-2-methoxy-acetate

[0092] FIG. 3 shows herbicide damage in percentage of individual Glycine max transformants three days after sprayment with 12.5 g a.i./ha methyl 2-[2-[2-bromo-4-fluoro-5-[3-methyl-2,6-dioxo-4-(trifluoromethyl)pyrimidin-1-yl]phenoxy]phenoxy]-2-methoxy-acetate

[0093] FIG. 4 shows herbicide damage in percentage of individual Glycine max transformants four days after sprayment with 25 g a.i./ha methyl 2-[2-[2-bromo-4-fluoro-5-[3-methyl-2,6-dioxo-4-(trifluoromethyl)pyrimidin-1-yl]phenoxy]phenoxy]-2-methoxy-acetate

[0094] FIG. 5 shows herbicide damage in percentage of individual Glycine max transformants three days after sprayment with 25 g a.i./ha methyl 2-[2-[2-bromo-4-fluoro-5-[3-methyl-2,6-dioxo-4-(trifluoromethyl)pyrimidin-1-yl]phenoxy]phenoxy]-2-methoxy-acetate

[0095] FIGS. 6 A-H show individual Glycine max. (T0) plants transformed with 4 constructs harboring herbicide-resistant/tolerant PPO enzymes

[0096] A:
[0097] SEQ ID NO: 661; codon-optimized for soybean; and fused to the chloroplast targeting peptide of PPO1, derived from Camelina sativa; 12.5 g a.i./ha methyl 2-[2-[2-bromo-4-fluoro-5-[3-methyl-2,6-dioxo-4-(trifluoromethyl)pyrimidin-1-yl]phenoxy]phenoxy]-2-methoxy-acetate; 4 DAT
[0098] B:
[0099] SEQ ID NO: 661; codon-optimized for soybean; and fused to the mitochondria/chloroplast dual targeting peptide of PPO2, derived from Amaranthus tuberculatus; 12.5 g a.i./ha methyl 2-[2-[2-bromo-4-fluoro-5-[3-methyl-2,6-dioxo-4-(trifluoromethyl)pyrimidin-1-yl]phenoxy]phenoxy]-2-methoxy-acetate; 4 DAT
[0100] C:
[0101] SEQ ID NO: 661; in which the Arginine at position 129 is substituted by Glutamine; codon-optimized for soybean; and fused to the chloroplast targeting peptide of PPO1, derived from Camelina sativa; 12.5 g a.i./ha methyl 2-[2-[2-bromo-4-fluoro-5-[3-methyl-2,6-dioxo-4-(trifluoromethyl)pyrimidin-1-yl]phenoxy]phenoxy]-2-methoxy-acetate; 4 DAT
[0102] D:
[0103] 1: SEQ ID NO: 661; codon-optimized for soybean; and fused to the chloroplast targeting peptide of PPO1, derived from Camelina sativa; 12.5 g a.i./ha methyl 2-[2-[2-bromo-4-fluoro-5-[3-methyl-2,6-dioxo-4-(trifluoromethyl)pyrimidin-1-yl]phenoxy]phenoxy]-2-methoxy-acetate; 4 DAT
[0104] 2: SEQ ID NO: 661; in which the Arginine at position 129 is substituted by Glutamine; codon-optimized for soybean; and fused to the chloroplast targeting peptide of PPO1, derived from Camelina sativa; 12.5 g a.i./ha methyl 2-[2-[2-bromo-4-fluoro-5-[3-methyl-2,6-dioxo-4-(trifluoromethyl)pyrimidin-1-yl]phenoxy]phenoxy]-2-methoxy-acetate; 4 DAT
[0105] 3: SEQ ID NO: 661; codon-optimized for soybean; and fused to the mitochondria/chloroplast dual targeting peptide of PPO2, derived from Amaranthus tuberculatus; 12.5 g a.i./ha methyl 2-[2-[2-bromo-4-fluoro-5-[3-methyl-2,6-dioxo-4-(trifluoromethyl)pyrimidin-1-yl]phenoxy]phenoxy]-2-methoxy-acetate; 4 DAT
[0106] E:
[0107] SEQ ID NO: 661; codon-optimized for soybean; and fused to the chloroplast targeting peptide of PPO1, derived from Camelina sativa; 12.5 g a.i./ha methyl 2-[2-[2-bromo-4-fluoro-5-[3-methyl-2,6-dioxo-4-(trifluoromethyl)pyrimidin-1-yl]phenoxy]phenoxy]-2-methoxy-acetate; 6 DAT; compared to untransformed wildtype
[0108] F:
[0109] SEQ ID NO: 661; codon-optimized for soybean; and fused to the mitochondria/chloroplast dual targeting peptide of PPO2, derived from Amaranthus tuberculatus; 12.5 g a.i./ha methyl 2-[2-[2-bromo-4-fluoro-5-[3-methyl-2,6-dioxo-4-(trifluoromethyl)pyrimidin-1-yl]phenoxy]phenoxy]-2-methoxy-acetate; 6 DAT; compared to untransformed wildtype
[0110] G:
[0111] SEQ ID NO: 661; in which the Arginine at position 129 is substituted by Glutamine; codon-optimized for soybean; and fused to the chloroplast targeting peptide of PPO1, derived from Camelina sativa; 12.5 g a.i./ha methyl 2-[2-[2-bromo-4-fluoro-5-[3-methyl-2,6-dioxo-4-(trifluoromethyl)pyrimidin-1-yl]phenoxy]phenoxy]-2-methoxy-acetate; 6 DAT; compared to untransformed wildtype
[0112] H:
[0113] SEQ ID NO: 665; codon-optimized for soybean; and fused to the chloroplast targeting peptide of PPO1, derived from Camelina sativa; 12.5 g a.i./ha methyl 2-[2-[2-bromo-4-fluoro-5-[3-methyl-2,6-dioxo-4-(trifluoromethyl)pyrimidin-1-yl]phenoxy]phenoxy]-2-methoxy-acetate; 15 DAT;

### DETAILED DESCRIPTION

[0114] The articles “a” and “an” are used herein to refer to one or more than one (i.e., to at least one) of the grammatical object of the article. By way of example, “an element” means one or more elements.

[0115] As used herein, the word “comprising,” or variations such as “comprises” or “comprising,” will be understood to imply the inclusion of a stated element, integer or step, or group of elements, integers or steps, but not the exclusion of any other element, integer or step, or group of elements, integers or steps.

[0116] The inventors of the present invention have found, that the tolerance or resistance of a plant to a phenyluracil herbicide could be remarkably increased by overexpressing a nucleic acid encoding PPO polypeptides described hereinafter.

[0117] The present invention refers to a method for controlling undesired vegetation at a plant cultivation site, the method comprising the steps of:
[0118] a) providing, at said site, a plant that comprises at least one nucleic acid comprising a nucleotide sequence encoding a protoporphyrinogen oxidase (mutated PPO) which is resistant or tolerant to a PPO-inhibiting herbicide as defined hereinafter,
[0119] b) applying to said site an effective amount of said herbicide, wherein the PPO inhibiting herbicide is a phenyluracil of formula (I)

[chemical structure]

[0120] wherein
   [0121] R¹ hydrogen, NH₂, C₁-C₆-alkyl or C₃-C₆-alkynyl;
   [0122] R² hydrogen, C₁-C₆-alkyl or C₁-C₆-haloalkyl;
   [0123] R³ hydrogen or C₁-C₆-alkyl;
   [0124] R⁴ H or halogen;
   [0125] R⁵ halogen, CN, C₁-C₃-haloalkyl, C₁-C₃-alkoxy, C₁-C₃-haloalkoxy, C₁-C₃-alkylthio, (C₁-C₃-alkyl)amino, di(C₁-C₃-alkyl)amino, C₁-C₃-alkoxy-C₁-C₃-alkyl, C₁-C₃-alkoxycarbonyl;
   [0126] R⁶ H, halogen, C₁-C₃-alkyl, C₁-C₃-alkoxy;
   [0127] R⁷ OR⁸, SR⁸, NR⁹R¹⁰, NR⁸OR⁹, NR⁸S(O)₂R⁹ or NR⁸S(O)₂NR⁹R¹⁰, wherein
      [0128] R⁸ is hydrogen, C₁-C₆-alkyl, C₃-C₆-alkenyl, C₃-C₆-alkynyl, C₁-C₆-haloalkyl, C₃-C₆-haloalkenyl, C₃-C₆-haloalkynyl, C₁-C₆-cyanoalkyl, C₁-C₆-alkoxy-C₁-C₆-alkyl, C₁-C₆-alkoxy-C₁-C₆-alkoxy-C₁-C₆-alkyl, di(C₁-C₆-alkoxy)C₁-C₆-alkyl, C₁-C₆-halo-alkoxy-C₁-C₆-alkyl, C₃-C₆-alkenyloxy-C₁-C₆-alkyl, C₃-C₆-haloalkenyloxy-C₁-C₆-alkyl, C₃-C₆-alkenyloxy-C₁-C₆-alkoxy-C₁-C₆-alkyl, C₁-C₆-alkylthio-C₁-C₆-alkyl, C₁-C₆-alkylsulfinyl-C₁-C₆-alkyl, C₁-C₆-alkylsulfonyl-C₁-C₆-alkyl, C₁-C₆-alkylcarbonyl-C₁-C₆-alkyl, C₁-C₆-alkoxycarbonyl-C₁-C₆-alkyl, C₁-C₆-haloalkoxycarbonyl-C₁-C₆-alkyl, C₃-C₆-alkenyloxycarbonyl-C₁-C₆-alkyl, C₃-C₆-alkynyloxycarbonyl-C₁-C₆-alkyl, amino, (C₁-C₆-alkyl)amino, di(C₁-C₆-alkyl)amino, (C₁-C₆-alkylcarbonyl)amino, amino-C₁-C₆-alkyl, (C₁-C₆-alkyl)amino-C₁-C₆-alkyl, di(C₁-C₆-alkyl)amino-C₁-C₆-alkyl, aminocarbonyl-C₁-C₆-alkyl, (C₁-C₆-alkyl)aminocarbonyl-C₁-C₆-alkyl, di(C₁-C₆-alkyl)aminocarbonyl-C₁-C₆-alkyl,
      [0129] —N═CR¹¹R¹², wherein R¹¹ and R¹² independently of one another are H, C₁-C₄-alkyl or phenyl;
      [0130] C₃-C₆-cycloalkyl, C₃-C₆-cycloalkyl-C₁-C₆-alkyl, C₃-C₆-heterocyclyl, C₃-C₆-heterocyclyl-C₁-C₆-alkyl, phenyl, phenyl-C₁-C₄-alkyl or a 5- or 6 membered heteroaryl,
         [0131] wherein each cycloalkyl, heterocyclyl, phenyl or heteroaryl ring can be substituted by one to four substituents selected from R¹³ or a 3- to 7-membered carbocyclus,
         which carbocyclus optionally has in addition to carbon atoms one or two ring members selected from the group consisting of
         —N(R¹¹)—, —N═N—, —C(═O)—, —O— and —S—, and
         which carbocyclus is optionally substituted with one to four substituents selected from R¹³;
         wherein R¹³ is halogen, NO₂, CN, C₁-C₄-alkyl, C₁-C₄-haloalkyl, C₁-C₄-alkoxy or C₁-C₄-alkoxycarbonyl;
      [0132] R⁹, R¹⁰ independently of one another are R⁸, or together form a 3- to 7-membered carbocyclus,
         [0133] which carbocyclus optionally has in addition to carbon atoms one or two ring members selected from the group consisting of —N(R¹¹)—, —N═N—, —C(═O)—, —O— and —S—, and
         [0134] which carbocyclus is optionally substituted with one to four substituents selected from R¹³;
   [0135] n 1 to 3;
   [0136] Q CH₂, O, S, SO, SO₂, NH or (C₁-C₃-alkyl)N;
   [0137] W O or S;
   [0138] X NH, NCH₃, O or S;
   [0139] Y O or S;
   [0140] Z phenyl, pyridyl, pyridazinyl, pyrimidinyl or pyrazinyl, each of which is optionally substituted by 1 to 4 substituents selected from the group consisting of halogen, CN, C₁-C₆-alkyl, C₁-C₆-haloalkyl, C₁-C₆-alkoxy, C₁-C₆-haloalkoxy;
   [0141] including their agriculturally acceptable salts, amides, esters or thioesters, provided the phenyluracils of formula (I) have a carboxyl group

[0142] The term “control of undesired vegetation” is to be understood as meaning the killing of weeds and/or otherwise retarding or inhibiting the normal growth of the weeds. Weeds, in the broadest sense, are understood as meaning all those plants which grow in locations where they are undesired, e.g. (crop) plant cultivation sites. The weeds of the present invention include, for example, dicotyledonous and monocotyledonous weeds. Dicotyledonous weeds include, but are not limited to, weeds of the genera: Sinapis, Lepidium, Galium, Stellaria, Matricaria, Anthemis, Galinsoga, Chenopodium, Urtica, Senecio, Amaranthus, Portulaca, Xanthium, Convolvulus, Ipomoea, Polygonum, Sesbania, Ambrosia, Cirsium, Carduus, Sonchus, Solanum, Rorippa, Rotala, Lindernia, Lamium, Veronica, Abutilon, Emex, Datura, Viola, Galeopsis, Papaver, Centaurea, Trifolium, Ranunculus, and Taraxacum. Monocotyledonous weeds include, but are not limited to, weeds of the genera: Echinochloa, Setaria, Panicum, Digitaria, Phleum, Poa, Festuca, Eleusine, Brachiaria, Lolium, Bromus, Avena, Cyperus, Sorghum, Agropyron, Cynodon, Monochoria, Fimbristyslis, Sagittaria, Eleocharis, Scirpus, Paspalum, Ischaemum, Sphenoclea, Dactyloctenium, Agrostis, Alopecurus, and Apera. In addition, the weeds of the present invention can include, for example, crop plants that are growing in an undesired location. For example, a volunteer maize plant that is in a field that predominantly comprises soybean plants can be considered a weed, if the maize plant is undesired in the field of soybean plants.

[0143] The term “plant” is used in its broadest sense as it pertains to organic material and is intended to encompass eukaryotic organisms that are members of the Kingdom Plantae, examples of which include but are not limited to vascular plants, vegetables, grains, flowers, trees, herbs, bushes, grasses, vines, ferns, mosses, fungi and algae, etc, as well as clones, offsets, and parts of plants used for asexual propagation (e.g. cuttings, pipings, shoots, rhizomes, underground stems, clumps, crowns, bulbs, corms, tubers, rhizomes, plants/tissues produced in tissue culture, etc.). The term “plant” further encompasses whole plants, ancestors and progeny of the plants and plant parts, including seeds, shoots, stems, leaves, roots (including tubers), flowers, florets, fruits, pedicles, peduncles, stamen, anther, stigma, style, ovary, petal, sepal, carpel, root tip, root cap, root hair, leaf hair, seed hair, pollen grain, microspore, cotyledon, hypocotyl, epicotyl, xylem, phloem, parenchyma, endosperm, a companion cell, a guard cell, and any other known organs, tissues, and cells of a plant, and tissues and organs, wherein each of the aforementioned comprise the gene/nucleic acid of interest. The term “plant” also encompasses plant cells, suspension cultures, callus tissue, embryos, meristematic regions, gametophytes, sporophytes, pollen and microspores, again wherein each of the aforementioned comprises the gene/nucleic acid of interest.

[0144] Plants that are particularly useful in the methods of the invention include all plants which belong to the superfamily Viridiplantae, in particular monocotyledonous and dicotyledonous plants including fodder or forage legumes, ornamental plants, food crops, trees or shrubs selected from the list comprising Acer spp., Actinidia spp., Abelmoschus spp., Agave sisalana, Agropyron spp., Agrostis stolonifera, Allium spp., Amaranthus spp., Ammophila arenaria, Ananas comosus, Annona spp., Apium graveolens, Arachis spp, Artocarpus spp., Asparagus officinalis, Avena spp. (e.g. Avena sativa, Avena fatua, Avena byzantina, Avena fatua var. sativa, Avena hybrida), Averrhoa carambola, Bambusa sp., Benincasa hispida, Bertholletia excelsea, Beta vulgaris, Brassica spp. (e.g. Brassica napus, Brassica rapa ssp. [canola, oilseed rape, turnip rape]), Cadaba farinosa, Camellia sinensis, Canna indica, Cannabis sativa, Capsicum spp., Carex elata, Carica papaya, Carissa macrocarpa, Carya spp., Carthamus tinctorius, Castanea spp., Ceiba pentandra, Cichorium endivia, Cinnamomum spp., Citrullus lanatus, Citrus spp., Cocos spp., Coffea spp., Colocasia esculenta, Cola spp., Corchorus sp., Coriandrum sativum, Corylus spp., Crataegus spp., Crocus sativus, Cucurbita spp., Cucumis spp., Cynara spp., Daucus carota, Desmodium spp., Dimocarpus longan, Dioscorea spp., Diospyros spp., Echinochloa spp., Elaeis (e.g. Elaeis guineensis, Elaeis oleifera), Eleusine coracana, Eragrostis tef, Erianthus sp., Eriobotrya japonica, Eucalyptus sp., Eugenia uniflora, Fagopyrum spp., Fagus spp., Festuca arundinacea, Ficus carica, Fortunella spp., Fragaria spp., Ginkgo biloba, Glycine spp. (e.g. Glycine max, Soja hispida or Soja max), Gossypium hirsutum, Helianthus spp. (e.g. Helianthus annuus), Hemerocallis fulva, Hibiscus spp., Hordeum spp. (e.g. Hordeum vulgare), Ipomoea batatas, Juglans spp., Lactuca sativa, Lathyrus spp., Lens culinaris, Linum usitatissimum, Litchi chinensis, Lotus spp., Luffa acutangula, Lupinus spp., Luzula sylvatica, Lycopersicon spp. (e.g. Lycopersicon esculentum, Lycopersicon lycopersicum, Lycopersicon pyriforme), Macrotyloma spp., Malus spp., Malpighia emarginata, Mammea americana, Mangifera indica, Manihot spp., Manilkara zapota, Medicago sativa, Melilotus spp., Mentha spp., Miscanthus sinensis, Momordica spp., Morus nigra, Musa spp., Nicotiana spp., Olea spp., Opuntia spp., Ornithopus spp., Oryza spp. (e.g. Oryza sativa, Oryza latifolia), Panicum miliaceum, Panicum virgatum, Passiflora edulis, Pastinaca sativa, Pennisetum sp., Persea spp., Petroselinum crispum, Phalaris arundinacea, Phaseolus spp., Phleum pratense, Phoenix spp., Phragmites australis, Physalis spp., Pinus spp., Pistacia vera, Pisum spp., Poa spp., Populus spp., Prosopis spp., Prunus spp., Psidium spp., Punica granatum, Pyrus communis, Quercus spp., Raphanus sativus, Rheum rhabarbarum, Ribes spp., Ricinus communis, Rubus spp., Saccharum spp., Salix sp., Sambucus spp., Secale cereale, Sesamum spp., Sinapis sp., Solanum spp. (e.g. Solanum tuberosum, Solanum integrifolium or Solanum lycopersicum), Sorghum bicolor, Spinacia spp., Syzygium spp., Tagetes spp., Tamarindus indica, Theobroma cacao, Trifolium spp., Tripsacum dactyloides, Triticosecale rimpaui, Triticum spp. (e.g. Triticum aestivum, Triticum durum, Triticum turgidum, Triticum hybernum, Triticum macha, Triticum sativum, Triticum monococcum or Triticum vulgare), Tropaeolum minus, Tropaeolum majus, Vaccinium spp., Vicia spp., Vigna spp., Viola odorata, Vitis spp., Zea mays, Zizania palustris, Ziziphus spp., amaranth, artichoke, asparagus, broccoli, Brussels sprouts, cabbage, canola, carrot, cauliflower, celery, collard greens, flax, kale, lentil, oilseed rape, okra, onion, potato, rice, soybean, strawberry, sugar beet, sugar cane, sunflower, tomato, squash, tea and algae, amongst others. According to a preferred embodiment of the present invention, the plant is a crop plant. Examples of crop plants include inter alia soybean, sunflower, canola, alfalfa, rapeseed, cotton, tomato, potato or tobacco. Further preferably, the plant is a monocotyledonous plant, such as sugarcane. Further preferably, the plant is a cereal, such as rice, maize, wheat, barley, millet, rye, sorghum or oats.

[0145] In a preferred embodiment, the plant has been previously produced by a process comprising recombinantly preparing a plant by introducing and over-expressing a wild-type or mutated PPO transgene according to the present invention, as described in greater detail hereinafter.

[0146] In another preferred embodiment, the plant has been previously produced by a process comprising in situ mutagenizing plant cells, to obtain plant cells which express a mutated PPO.

[0147] As disclosed herein, the nucleic acids of the invention find use in enhancing the herbicide tolerance of plants that comprise in their genomes a gene encoding a herbicide-tolerant wild-type or mutated PPO protein. Such a gene may be an endogenous gene or a transgene, as described hereinafter.

[0148] Therefore, in another embodiment the present invention refers to a method of increasing or enhancing the phenyluracil herbicide tolerance or resistance of a plant, the method comprising overexpressing a nucleic acid encoding a PPO polypeptide which comprises one or more of the following motifs 1, 2, and/or 3:
[0149] a. Motif 1: SQ[N/K/H]KRYI, wherein the Arg at position 5 within said motif is substituted by any other amino acid;
[0150] b. Motif 2: TLGTLFSS, wherein the Leu at position 2 and/or the Gly at position 3, and/or the Leu at position 5 within said motif is substituted by any other amino acid;
[0151] c. Motif 3: [F/Y]TTF[V/I]GG, wherein the Phe at position 4 within said motif is substituted by any other amino acid.

[0152] In another embodiment the present invention refers to a method of increasing or enhancing the phenyluracil herbicide tolerance or resistance of a plant, the method comprising overexpressing a nucleic acid encoding a herbicide resistant or tolerant PPO polypeptide which comprises a variant of the amino acid sequence of SEQ ID NO: 1, 2, 3, 4, 5, 6, 7, 8, 9, 10, 11, 12, 13, 14, 15, 16, 17, 18, 19, 20, 21, 22, 23, 24, 25, 26, 27, 28, 29, 30, 31, 32, 33, 34, 35, 36, 37, 38, 39, 40, 41, 42, 43, 44, 45, 46, 47, 48, 49, 50, 51, 52, 53, 54, 55, 56, 57, 58, 59, 60, 61, 62, 63, 64, 65, 66, 67, 68, 69, 70, 71, 72, 73, 74, 75, 76, 77, 78, 79, 80, 81, 82, 83, 84, 85, 86, 87, 88, 89, 90, 91, 92, 93, 94, 95, 96, 97, 98, 99, 100, 101, 102, 103, 104, 105, 106, 107, 108, 109, 110, 111, 112, 113, 114, 115, 116, 117, 577, 579, 581, 583, 585, 587, 589, 591, 593, 595, 597, 599, 601, 603, 605, 607, 609, 611, 613, 615, 617, 619, 621, 623, 625, 627, or 637, which variant comprises one or more of the following substitutions:
[0153] a. the amino acid corresponding to Arg128 of SEQ ID NO: 1 is substituted by any other amino acid.
[0154] b. The amino acid corresponding to Gly211 of SEQ ID NO: 1 is substituted by any other amino acid
[0155] c. the amino acid corresponding to Leu397 of SEQ ID NO: 1 is substituted by any other amino acid.
[0156] d. the amino acid corresponding to Gly398 of SEQ ID NO: 1 is substituted by any other amino acid
[0157] e. the amino acid corresponding to Leu400 of SEQ ID NO: 1 is substituted by any other amino acid
[0158] f. the amino acid corresponding to Phe420 of SEQ ID NO: 1 is substituted by any other amino acid.

[0159] In another embodiment the present invention refers to a method of increasing or enhancing the phenyluracil herbicide tolerance or resistance of a plant, the method comprising overexpressing a nucleic acid encoding a herbicide resistant or tolerant PPO polypeptide which comprises the amino acid sequence of SEQ ID NO: 265, 266, 267, 268, 269, 270, 271, 272, 273, 274, 275, 276, 277, 278, 279, 280, 281, 282, 283, 284, 285, 286, 287, 288, 289, 290, 291, 292, 293, 294, 295, 296, 297, 298, 299, 300, 301, 302, 303, 304, 305, 306, 307, 308, 309, 310, 311, 312, 313, 314, 315, 316, 317, 318, 319, 320, 321, 322, 323, 324, 325, 326, 327328, 329, 330, 331, 332, 333, 334, 335, 336, 337, 338, 339, 340, 341, 342, 343, 344, 345, 346, 347, 348, 349, 350, 351, 352, 353, 354, 355, 356, 357, 358, 359, 360, 361, 362, 363, 364, 365, 366, 367, 368, 369, 370, 371, 372, 373, 374, 375, 376, 377, 378, 379, 380, 381, 382, 383, 384, 385, 386, 387, 388, 389, 390, 391, 392, 393, 394, 395, 396, 397, 398, 399, 400, 401, 402, 403, 404, 405, 406, 407, 408, 409, 410, 411, 412, 413, 414, 415, 416, 417, 418, 419, 420, 421, 422, 423, 424, 425, 426, 427, 428, 429, 430, 431, 432, 433, 434, 435, 436, 437, 438, 439, 440, 441, 442, 443, 444, 445, 446, 447, 448, 449, 450, 451, 452, 453, 454, 455, 456, 457, 458, 459, 460, 461, 462, 463, 464, 465, 466, 467, 468, 469, 470, 471, 472, 473, 474, 475, 476, 477, 478, 479, 480, 481, 482, 483, 484, 485, 486, 487, 488, 489, 490, 491, 492, 493, 494, 495, 496, 497, 498, 499, 500, 501, 502, 503, 504, 505, 506, 507, 508, 509, 510, 511, 512, 513, 514, 515, 516, 517, 518, 519, 520, 521, 522, 523, 524, 525, 526, 527, 528, 529, 530, 531, 532, 533, 534, 535, 536, 537, 538, 539, 540, 541, 542, 543, 544, 545, 546, 547, 548, 549, 550, 551, 552, 553, 554, 555, 556, 557, 558, 559, 560, 561, 562, 563, 564, 565, 651; 652; 653; 654; 655; 656; 657; 658; 659; 660; 661; 662; 663; 664; 665; 666; 667; 668; 669; 670; 671, 714; 715; 716; 717; 718; 719; 720; 721; 722; 723; 724; 725; 726; 727; 728; 729; 730; 731; 732; 733; 734; 735; 736; 737; 738, 795, 882, 883, 884, 885, 886, 887, 888, 889, 890, 891, 892, 893, 894, 895, 896, 897, 898, 899, 900, 901, 902, 903, 904, 905, 906, 907, 908, 909, 910, 911, 912, 913, 914, 915, 916, 917, 918, 919, 920, 921, 922, 923, 924, 925, 926, 927, 928, 929, 930, 931, 932, 933, 934, 935, 936, 937, 938, 939, 940, 941, 942, 943, 944, 945, 946, 947, 948, 949, 950, 951, 952, 953, 954, 955, 956, 957, 958, 959, 960, or a variant or homologue thereof.

[0160] In another embodiment the present invention refers to a method of increasing or enhancing the phenyluracil herbicide tolerance or resistance of a plant, the method comprising overexpressing a nucleic acid encoding a herbicide resistant or tolerant PPO polypeptide which comprises the amino acid sequence of SEQ ID NO: 240, 241, 242, 243, 244, 245, 246, 247, 248, 249, 250, 251, 252, 253, 254, 255, 256, 257, 258, 259, 260, 261, 262, or 264.

[0161] Additionally, in certain embodiments, the nucleic acids of the present invention can be stacked with any combination of polynucleotide sequences of interest in order to create plants with a desired phenotype. For example, the nucleic acids of the present invention may be stacked with any other polynucleotides encoding polypeptides having pesticidal and/or insecticidal activity, such as, for example, the Bacillus thuringiensis toxin proteins (described in U.S. Pat. Nos. 5,366,892; 5,747,450; 5,737,514; 5,723,756; 5,593,881; and Geiser et al (1986) Gene 48: 109),

[0162] By way of example, polynucleotides that may be stacked with the nucleic acids of the present invention include nucleic acids encoding polypeptides conferring resistance to pests/pathogens such as viruses, nematodes, insects or fungi, and the like. Exemplary polynucleotides that may be stacked with nucleic acids of the invention include polynucleotides encoding: polypeptides having pesticidal and/or insecticidal activity, such as other Bacillus thuringiensis toxic proteins (described in U.S. Pat. Nos. 5,366,892; 5,747,450; 5,737,514; 5,723,756; 5,593,881; and Geiser et al., (1986) Gene 48:109), lectins (Van Damme et al. (1994) Plant Mol. Biol. 24:825, pentin (described in U.S. Pat. No. 5,981,722), and the like; traits desirable for disease or herbicide resistance (e.g., fumonisin detoxification genes (U.S. Pat. No. 5,792,931); avirulence and disease resistance genes (Jones et al. (1994) Science 266:789; Martin et al., (1993) Science 262:1432; Mindrinos et al. (1994) Cell 78:1089); acetolactate synthase (ALS) mutants that lead to herbicide resistance such as the S4 and/or Hra mutations; glyphosate resistance (e.g., 5-enol-pyrovyl-shikimate-3-phosphate-synthase (EPSPS) gene, described in U.S. Pat. Nos. 4,940,935 and 5,188,642; or the glyphosate N-acetyltransferase (GAT) gene, described in Castle et al. (2004) Science, 304:1151-1154; and in U.S. Patent App. Pub. Nos. 20070004912, 20050246798, and 20050060767)); glufosinate resistance (e.g, phosphinothricin acetyl transferase genes PAT and BAR, described in U.S. Pat. Nos. 5,561,236 and 5,276,268); resistance to herbicides including sulfonyl urea, DHT (2,4D), and PPO herbicides (e.g., glyphosate acetyl transferase, aryloxy alkanoate dioxygenase, acetolactate synthase, and protoporphyrinogen oxidase); a cytochrome P450 or variant thereof that confers herbicide resistance or tolerance to, inter alia, HPPD herbicides (U.S. patent application Ser. No. 12/156,247; U.S. Pat. Nos. 6,380,465; 6,121,512; 5,349,127; 6,649,814; and 6,300,544; and PCT Patent App. Pub. No. WO2007000077); and traits desirable for processing or process products such as high oil (e.g., U.S. Pat. No. 6,232,529); modified oils (e.g., fatty acid desaturase genes (U.S. Pat. No. 5,952,544; WO 94/11516)); modified starches (e.g., ADPG pyrophosphorylases (AGPase), starch synthases (SS), starch branching enzymes (SBE), and starch debranching enzymes (SDBE)); and polymers or bioplastics (e.g., U.S. Pat. No. 5,602,321; beta-ketothiolase, polyhydroxybutyrate synthase, and acetoacetyl-CoA reductase (Schubert et al. (1988) J. Bacteriol. 170:5837-5847) facilitate expression of polyhydroxyalkanoates (PHAs)); the disclosures of which are herein incorporated by reference.

[0163] In a preferred embodiment, the plant comprises at least one additional heterologous nucleic acid comprising a nucleotide sequence encoding a herbicide tolerance enzyme selected, for example, from the group consisting of 5-enolpyruvylshikimate-3-phosphate synthase (EPSPS), Glyphosate acetyl transferase (GAT), cytochrome P450 monooxygenase, phosphinothricin acetyltransferase (PAT), Acetohydroxyacid synthase (AHAS; EC 4.1.3.18, also known as acetolactate synthase or ALS), hydroxyphenyl pyruvate dioxygenase (HPPD), Phytoene desaturase (PD) and dicamba degrading enzymes as disclosed in WO 02/068607, or phenoxyaceticacid- and phenoxypropionicacid-derivative degrading enzymes as disclosed in WO 2008141154 or WO 2005107437. The combinations generated can also include multiple copies of any one of the polynucleotides of interest.

[0164] Generally, the term “herbicide” is used herein to mean an active ingredient that kills, controls or otherwise adversely modifies the growth of plants. The preferred amount or concentration of the herbicide is an “effective amount” or “effective concentration.” By “effective amount” and “effective concentration” is intended an amount and concentration, respectively, that is sufficient to kill or inhibit the growth of a similar, wild-type, plant, plant tissue, plant cell, or host cell, but that said amount does not kill or inhibit as severely the growth of the herbicide-resistant plants, plant tissues, plant cells, and host cells of the present invention. Typically, the effective amount of a herbicide is an amount that is routinely used in agricultural production systems to kill weeds of interest. Such an amount is known to those of ordinary skill in the art. Herbicidal activity is exhibited by herbicides useful for the present invention when they are applied directly to the plant or to the locus of the plant at any stage of growth or before planting or emergence. The effect observed depends upon the plant species to be controlled, the stage of growth of the plant, the application parameters of dilution and spray drop size, the particle size of solid components, the environmental conditions at the time of use, the specific compound employed, the specific adjuvants and carriers employed, the soil type, and the like, as well as the amount of chemical applied. These and other factors can be adjusted as is known in the art to promote non-selective or selective herbicidal action. Generally, it is preferred to apply the herbicide postemergence to relatively immature undesirable vegetation to achieve the maximum control of weeds.

[0165] By a “herbicide-tolerant” or “herbicide-resistant” plant, it is intended that a plant that is tolerant or resistant to at least one herbicide at a level that would normally kill, or inhibit the growth of, a normal or wild-type plant. By “herbicide-tolerant wildtype or mutated PPO protein” or “herbicide-resistant wildtype or mutated PPO protein”, it is intended that such a PPO protein displays higher PPO activity, relative to the PPO activity of a wild-type PPO protein, when in the presence of at least one herbicide that is known to interfere with PPO activity and at a concentration or level of the herbicide that is known to inhibit the PPO activity of the wild-type mutated PPO protein. Furthermore, the PPO activity of such a herbicide-tolerant or herbicide-resistant mutated PPO protein may be referred to herein as “herbicide-tolerant” or “herbicide-resistant” PPO activity.

[0166] In a particularly preferred embodiment, the herbicides useful for the present invention refer phenyluracils of formula (I)

[chemical structure]

[0167] wherein
[0168] R¹ hydrogen, NH₂, C₁-C₆-alkyl or C₃-C₆-alkynyl;
[0169] R² hydrogen, C₁-C₆-alkyl or C₁-C₆-haloalkyl;
[0170] R³ hydrogen or C₁-C₆-alkyl;
[0171] R⁴ H or halogen;
[0172] R⁵ halogen, CN, C₁-C₃-haloalkyl, C₁-C₃-alkoxy, C₁-C₃-haloalkoxy, C₁-C₃-alkylthio, (C₁-C₃-alkyl)amino, di(C₁-C₃-alkyl)amino, C₁-C₃-alkoxy-C₁-C₃-alkyl, C₁-C₃-alkoxycarbonyl;
[0173] R⁶ H, halogen, C₁-C₃-alkyl, C₁-C₃-alkoxy;
[0174] R⁷ OR⁸, SR⁸, NR⁹R¹⁰, NR⁸OR⁹, NR⁸S(O)₂R⁹ or NR⁸S(O)₂NR⁹R¹⁰, wherein
   [0175] R⁸ is hydrogen, C₁-C₆-alkyl, C₃-C₆-alkenyl, C₃-C₆-alkynyl, C₁-C₆-haloalkyl, C₃-C₆-haloalkenyl, C₃-C₆-haloalkynyl, C₁-C₆-cyanoalkyl, C₁-C₆-alkoxy-C₁-C₆-alkyl, C₁-C₆-alkoxy-C₁-C₆-alkoxy-C₁-C₆-alkyl, di(C₁-C₆-alkoxy)C₁-C₆-alkyl, C₁-C₆-halo-alkoxy-C₁-C₆-alkyl, C₃-C₆-alkenyloxy-C₁-C₆-alkyl, C₃-C₆-haloalkenyloxy-C₁-C₆-alkyl, C₃-C₆-alkenyloxy-C₁-C₆-alkoxy-C₁-C₆-alkyl, C₁-C₆-alkylthio-C₁-C₆-alkyl, C₁-C₆-alkylsulfinyl-C₁-C₆-alkyl, C₁-C₆-alkylsulfonyl-C₁-C₆-alkyl, C₁-C₆-alkylcarbonyl-C₁-C₆-alkyl, C₁-C₆-alkoxycarbonyl-C₁-C₆-alkyl, C₁-C₆-haloalkoxycarbonyl-C₁-C₆-alkyl, C₃-C₆-alkenyloxycarbonyl-C₁-C₆-alkyl, C₃-C₆-alkynyloxycarbonyl-C₁-C₆-alkyl, amino, (C₁-C₆-alkyl)amino, di(C₁-C₆-alkyl)amino, (C₁-C₆-alkylcarbonyl)amino, amino-C₁-C₆-alkyl, (C₁-C₆-alkyl)amino-C₁-C₆-alkyl, di(C₁-C₆-alkyl)amino-C₁-C₆-alkyl, aminocarbonyl-C₁-C₆-alkyl, (C₁-C₆-alkyl)aminocarbonyl-C₁-C₆-alkyl, di(C₁-C₆-alkyl)aminocarbonyl-C₁-C₆-alkyl,
   [0176] —N═CR¹¹R¹², wherein R¹¹ and R¹² independently of one another are H, C₁-C₄-alkyl or phenyl;
   [0177] C₃-C₆-cycloalkyl, C₃-C₆-cycloalkyl-C₁-C₆-alkyl, C₃-C₆-heterocyclyl, C₃-C₆-heterocyclyl-C₁-C₆-alkyl, phenyl, phenyl-C₁-C₄-alkyl or a 5- or 6 membered heteroaryl,
      [0178] wherein each cycloalkyl, heterocyclyl, phenyl or heteroaryl ring can be substituted by one to four substituents selected from R¹³ or a 3- to 7-membered carbocyclus,
         [0179] which carbocyclus optionally has in addition to carbon atoms one or two ring members selected from the group consisting of
         [0180] —N(R¹¹)—, —N═N—, —C(═O)—, —O— and —S—, and
         [0181] which carbocyclus is optionally substituted with one to four substituents selected from R¹³;
         wherein R¹³ is halogen, NO₂, CN, C₁-C₄-alkyl, C₁-C₄-haloalkyl, C₁-C₄-alkoxy or C₁-C₄-alkoxycarbonyl;
   [0182] R⁹, R¹⁰ independently of one another are R⁸, or together form a 3- to 7-membered carbocyclus,
      [0183] which carbocyclus optionally has in addition to carbon atoms one or two ring members selected from the group consisting of —N(R¹¹)—, —N═N—, —C(═O)—, —O— and —S—, and
      [0184] which carbocyclus is optionally substituted with one to four substituents selected from R¹³;
[0185] n 1 to 3;
[0186] Q CH₂, O, S, SO, SO₂, NH or (C₁-C₃-alkyl)N;
[0187] W O or S;
[0188] X NH, NCH₃, O or S;
[0189] Y O or S;
[0190] Z phenyl, pyridyl, pyridazinyl, pyrimidinyl or pyrazinyl, each of which is optionally substituted by 1 to 4 substituents selected from the group consisting of halogen, CN, C₁-C₆-alkyl, C₁-C₆-haloalkyl, C₁-C₆-alkoxy, C₁-C₆-haloalkoxy;
   [0191] including their agriculturally acceptable salts, amides, esters or thioesters, provided the phenyluracils of formula (I) have a carboxyl group

[0192] If the phenyluracils of formula (I) as described herein are capable of forming geometrical isomers, for example E/Z isomers, it is possible to use both, the pure isomers and mixtures thereof, according to the invention.

[0193] If the phenyluracils of formula (I) as described herein have one or more centres of chirality and, as a consequence, are present as enantiomers or diastereomers, it is possible to use both, the pure enantiomers and diastereomers and their mixtures, according to the invention.

[0194] Within the substituents of the phenyluracils of formula (I), instead of hydrogen also the corresponding isotope deuterium can be used.

[0195] If the phenyluracils of formula (I) as described herein have ionizable functional groups, they can also be employed in the form of their agriculturally acceptable salts. Suitable are, in general, the salts of those cations and the acid addition salts of those acids whose cations and anions, respectively, have no adverse effect on the activity of the active compounds.

[0196] Preferred cations are the ions of the alkali metals, preferably of lithium, sodium and potassium, of the alkaline earth metals, preferably of calcium and magnesium, and of the transition metals, preferably of manganese, copper, zinc and iron, further ammonium and substituted ammonium in which one to four hydrogen atoms are replaced by C₁-C₄-alkyl, hydroxy-C₁-C₄-alkyl, C₁-C₄-alkoxy-C₁-C₄-alkyl, hydroxy-C₁-C₄-alkoxy-C₁-C₄-alkyl, phenyl or benzyl, preferably ammonium, methylammonium, isopropylammonium, dimethylammonium, diethylammonium, diisopropylammonium, trimethylammonium, triethylammonium, tris(isopropyl)ammonium, heptylammonium, dodecylammonium, tetradecylammonium, tetramethylammonium, tetraethylammonium, tetrabutylammonium, 2-hydroxyethylammonium (olamine salt), 2-(2-hydroxyeth-1-oxy)eth-1-ylammonium (diglycolamine salt), di(2-hydroxyeth-1-yl)ammonium (diolamine salt), tris(2-hydroxyethyl)ammonium (trolamine salt), tris(2-hydroxypropyl)ammonium, benzyltrimethylammonium, benzyltriethylammonium, N,N,N-trimethylethanolammonium (choline salt), furthermore phosphonium ions, sulfonium ions, preferably tri(C₁-C₄-alkyl)sulfonium, such as trimethylsulfonium, and sulfoxonium ions, preferably tri(C₁-C₄-alkyl)sulfoxonium, and finally the salts of polybasic amines such as N,N-bis-(3-aminopropyl)methylamine and diethylenetriamine.

[0197] Anions of useful acid addition salts are primarily chloride, bromide, fluoride, iodide, hydrogensulfate, methylsulfate, sulfate, dihydrogenphosphate, hydrogenphosphate, nitrate, bicarbonate, carbonate, hexafluorosilicate, hexafluorophosphate, benzoate and also the anions of C₁-C₄-alkanoic acids, preferably formate, acetate, propionate and butyrate.

[0198] The Phenyluracils of formula (I) as described herein might carry a carboxyl group. Phenyluracils of formula (I) as described herein having a carboxyl group, i.e. those phenyluracils of formula (I) according to the invention, which carry a carboxyl group, i.e. provided the phenyluracils of formula (I) have a carboxyl group, such phenyluracils can be employed in the form of the acid, in the form of an agriculturally suitable salt as mentioned above or else in the form of an agriculturally acceptable derivative, for example as amides, such as mono- and di-C₁-C₆-alkylamides or arylamides, as esters, for example as allyl esters, propargyl esters, C₁-C₁₀-alkyl esters, alkoxyalkyl esters, tefuryl ((tetrahydrofuran-2-yl)methyl) esters and also as thioesters, for example as C₁-C₁₀-alkylthio esters. Preferred mono- and di-C₁-C₆-alkylamides are the methyl and the dimethylamides. Preferred arylamides are, for example, the anilides and the 2-chloroanilides. Preferred alkyl esters are, for example, the methyl, ethyl, propyl, isopropyl, butyl, isobutyl, pentyl, mexyl (1-methylhexyl), meptyl (1-methylheptyl), heptyl, octyl or isooctyl (2-ethylhexyl) esters. Preferred C₁-C₄-alkoxy-C₁-C₄-alkyl esters are the straight-chain or branched C₁-C₄-alkoxy ethyl esters, for example the 2-methoxyethyl, 2-ethoxyethyl, 2-butoxyethyl (butotyl), 2-butoxypropyl or 3-butoxypropyl ester. An example of a straight-chain or branched C₁-C₁₀-alkylthio ester is the ethylthio ester.

[0199] The organic moieties mentioned in the definition of the variables R¹ to R¹³ and R^{a} to R^{e}, are—like the term halogen—collective terms for individual enumerations of the individual group members. The term halogen denotes in each case fluorine, chlorine, bromine or iodine. All hydrocarbon chains can be straight-chain or branched, the prefix Cₙ-Cₘ denoting in each case the possible number of carbon atoms in the group.

[0200] Examples of such meanings are:
[0201] C₁-C₃-alkyl and also the C₁-C₃-alkyl moieties of di(C₁-C₃-alkyl)amino, C₁-C₃-alkoxy-C₁-C₃-alkyl: for example CH₃, C₂H₅, n-propyl and CH(CH₃)₂;
[0202] C₁-C₄-alkyl and also the C₁-C₄-alkyl moieties of phenyl-C₁-C₄-alkyl: for example CH₃, C₂H₅, n-propyl, CH(CH₃)₂, n-butyl, CH(CH₃)—C₂H₅, CH₂—CH(CH₃)₂ and C(CH₃)₃;
[0203] C₁-C₆-alkyl and also the C₁-C₆-alkyl moieties of C₁-C₆-cyanoalkyl, C₁-C₆-alkyoxy-C₁-C₆-alkyl, C₁-C₆-alkoxy-C₁-C₆-alkoxy-C₁-C₆-alkyl, di(C₁-C₆-alkoxy)C₁-C₆-alkyl, C₁-C₆-haloalkoxy-C₁-C₆-alkyl, C₃-C₆-alkenyloxy-C₁-C₆-alkyl, C₃-C₆-haloalkenyloxy-C₁-C₆-alkyl, C₃-C₆-alkenyloxy-C₁-C₆-alkoxy-C₁-C₆-alkyl, C₁-C₆-alkylthio-C₁-C₆-alkyl, C₁-C₆-alkylsulfinyl-C₁-C₆-alkyl, C₁-C₆-alkylsulfonyl-C₁-C₆-alkyl, C₁-C₆-alkylcarbonyl-C₁-C₆-alkyl, C₁-C₆-alkoxycarbonyl-C₁-C₆-alkyl, C₁-C₆-haloalkoxycarbonyl-C₁-C₆-alkyl, C₃-C₆-alkenyloxycarbonyl-C₁-C₆-alkyl, C₃-C₆-alkynyloxycarbonyl-C₁-C₆-alkyl, (C₁-C₆-alkylcarbonyl)amino, amino-C₁-C₆-alkyl, (C₁-C₆-alkyl)amino-C₁-C₆-alkyl, di(C₁-C₆-alkyl)amino-C₁-C₆-alkyl, aminocarbonyl-C₁-C₆-alkyl, (C₁-C₆-alkyl)aminocarbonyl-C₁-C₆-alkyl, di(C₁-C₆-alkyl)aminocarbonyl-C₁-C₆-alkyl, C₃-C₆-cycloalkyl-C₁-C₆-alkyl, C₃-C₆-heterocyclyl-C₁-C₆-alkyl: C₁-C₄-alkyl as mentioned above, and also, for example, n-pentyl, 1-methylbutyl, 2-methylbutyl, 3-methylbutyl, 2,2-dimethylpropyl, 1-ethylpropyl, n-hexyl, 1,1-dimethylpropyl, 1,2-dimethylpropyl, 1-methylpentyl, 2-methylpentyl, 3-methylpentyl, 4-methylpentyl, 1,1-dimethylbutyl, 1,2-dimethylbutyl, 1,3-dimethylbutyl, 2,2-dimethylbutyl, 2,3-dimethylbutyl, 3,3-dimethylbutyl, 1-ethylbutyl, 2-ethylbutyl, 1,1,2-trimethylpropyl, 1,2,2-trimethylpropyl, 1-ethyl-1-methylpropyl or 1-ethyl-2-methylpropyl, preferably methyl, ethyl, n-propyl, 1-methylethyl, n-butyl, 1,1-dimethylethyl, n-pentyl or n-hexyl;
[0204] C₁-C₃-haloalkyl: C₁-C₃-alkyl as mentioned above which is partially or fully substituted by fluorine, chlorine, bromine and/or iodine, for example, chloromethyl, dichloromethyl, trichloromethyl, fluoromethyl, difluoromethyl, trifluoromethyl, chlorofluoromethyl, dichlorofluoromethyl, chlorodifluoromethyl, bromomethyl, iodomethyl, 2-fluoroethyl, 2-chloroethyl, 2-bromoethyl, 2-iodoethyl, 2,2-difluoroethyl, 2,2,2-trifluoroethyl, 2-chloro-2-fluoroethyl, 2-chloro-2,2-difluoroethyl, 2,2-dichloro-2-fluoroethyl, 2,2,2-trichloroethyl, pentafluoroethyl, 2-fluoropropyl, 3-fluoropropyl, 2,2-difluoropropyl, 2,3-difluoropropyl, 2-chloropropyl, 3-chloropropyl, 2,3-dichloropropyl, 2-bromopropyl, 3-bromopropyl, 3,3,3-trifluoropropyl, 3,3,3-trichloropropyl, 2,2,3,3,3-pentafluoropropyl, heptafluoropropyl, 1-(fluoromethyl)-2-fluoroethyl, 1-(chloromethyl)-2-chloroethyl, 1-(bromomethyl)-2-bromoethyl;
[0205] C₁-C₄-haloalkyl: C₁-C₄-alkyl as mentioned above which is partially or fully substituted by fluorine, chlorine, bromine and/or iodine, for example, chloromethyl, dichloromethyl, trichloromethyl, fluoromethyl, difluoromethyl, trifluoromethyl, chlorofluoromethyl, dichlorofluoromethyl, chlorodifluoromethyl, bromomethyl, iodomethyl, 2-fluoroethyl, 2-chloroethyl, 2-bromoethyl, 2-iodoethyl, 2,2-difluoroethyl, 2,2,2-trifluoroethyl, 2-chloro-2-fluoroethyl, 2-chloro-2,2-difluoroethyl, 2,2-dichloro-2-fluoroethyl, 2,2,2-trichloroethyl, pentafluoroethyl, 2-fluoropropyl, 3-fluoropropyl, 2,2-difluoropropyl, 2,3-difluoropropyl, 2-chloropropyl, 3-chloropropyl, 2,3-dichloropropyl, 2-bromopropyl, 3-bromopropyl, 3,3,3-trifluoropropyl, 3,3,3-trichloropropyl, 2,2,3,3,3-pentafluoropropyl, heptafluoropropyl, 1-(fluoromethyl)-2-fluoroethyl, 1-(chloromethyl)-2-chloroethyl, 1-(bromomethyl)-2-bromoethyl, 4-fluorobutyl, 4-chlorobutyl, 4-bromobutyl, nonafluorobutyl, 1,1,2,2,-tetrafluoroethyl and 1-trifluoromethyl-1,2,2,2-tetrafluoroethyl;
[0206] C₁-C₆-haloalkyl: C₁-C₄-haloalkyl as mentioned above, and also, for example, 5-fluoropentyl, 5-chloropentyl, 5-bromopentyl, 5-iodopentyl, undecafluoropentyl, 6-fluorohexyl, 6-chlorohexyl, 6-bromohexyl, 6-iodohexyl and dodecafluorohexyl;
[0207] C₃-C₆-alkenyl and also the C₃-C₆-alkenyl moieties of C₃-C₆-alkenyloxy-C₁-C₆-alkyl, C₃-C₆-alkenyloxy-C₁-C₆-alkoxy-C₁-C₆-alkyl, C₃-C₆-alkenyloxycarbonyl-C₁-C₆-alkyl: for example 1-propenyl, 2-propenyl, 1-methylethenyl, 1-butenyl, 2-butenyl, 3-butenyl, 1-methyl-1-propenyl, 2-methyl-1-propenyl, 1-methyl-2-propenyl, 2-methyl-2-propenyl, 1-pentenyl, 2-pentenyl, 3-pentenyl, 4-pentenyl, 1-methyl-1-butenyl, 2-methyl-1-butenyl, 3-methyl-1-butenyl, 1-methyl-2-butenyl, 2-methyl-2-butenyl, 3-methyl-2-butenyl, 1-methyl-3-butenyl, 2-methyl-3-butenyl, 3-methyl-3-butenyl, 1,1-dimethyl-2-propenyl, 1,2-dimethyl-1-propenyl, 1,2-dimethyl-2-propenyl, 1-ethyl-1-propenyl, 1-ethyl-2-propenyl, 1-hexenyl, 2-hexenyl, 3-hexenyl, 4-hexenyl, 5-hexenyl, 1-methyl-1-pentenyl, 2-methyl-1-pentenyl, 3-methyl-1-pentenyl, 4-methyl-1-pentenyl, 1-methyl-2-pentenyl, 2-methyl-2-pentenyl, 3-methyl-2-pentenyl, 4-methyl-2-pentenyl, 1-methyl-3-pentenyl, 2-methyl-3-pentenyl, 3-methyl-3-pentenyl, 4-methyl-3-pentenyl, 1-methyl-4-pentenyl, 2-methyl-4-pentenyl, 3-methyl-4-pentenyl, 4-methyl-4-pentenyl, 1,1-dimethyl-2-butenyl, 1,1-dimethyl-3-butenyl, 1,2-dimethyl-1-butenyl, 1,2-dimethyl-2-butenyl, 1,2-dimethyl-3-butenyl, 1,3-dimethyl-1-butenyl, 1,3-dimethyl-2-butenyl, 1,3-dimethyl-3-butenyl, 2,2-dimethyl-3-butenyl, 2,3-dimethyl-1-butenyl, 2,3-dimethyl-2-butenyl, 2,3-dimethyl-3-butenyl, 3,3-dimethyl-1-butenyl, 3,3-dimethyl-2-butenyl, 1-ethyl-1-butenyl, 1-ethyl-2-butenyl, 1-ethyl-3-butenyl, 2-ethyl-1-butenyl, 2-ethyl-2-butenyl, 2-ethyl-3-butenyl, 1,1,2-trimethyl-2-propenyl, 1-ethyl-1-methyl-2-propenyl, 1-ethyl-2-methyl-1-propenyl and 1-ethyl-2-methyl-2-propenyl;
[0208] C₃-C₆-haloalkenyl and also the C₃-C₆-haloalkenyl moieties of C₃-C₆-haloalkenyloxy-C₁-C₆-alkyl: a C₃-C₆-alkenyl radical as mentioned above which is partially or fully substituted by fluorine, chlorine, bromine and/or iodine, for example 2-chloroprop-2-en-1-yl, 3-chloroprop-2-en-1-yl, 2,3-dichloroprop-2-en-1-yl, 3,3-dichloroprop-2-en-1-yl, 2,3,3-trichloro-2-en-1-yl, 2,3-dichlorobut-2-en-1-yl, 2-bromoprop-2-en-1-yl, 3-bromoprop-2-en-1-yl, 2,3-dibromoprop-2-en-1-yl, 3,3-dibromoprop-2-en-1-yl, 2,3,3-tribromo-2-en-1-yl or 2,3-dibromobut-2-en-1-yl;
[0209] C₃-C₆-alkynyl and also the C₃-C₆-alkynyl moieties of C₃-C₆-alkynyloxycarbonyl-C₁-C₆-alkyl: for example 1-propynyl, 2-propynyl, 1-butynyl, 2-butynyl, 3-butynyl, 1-methyl-2-propynyl, 1-pentynyl, 2-pentynyl, 3-pentynyl, 4-pentynyl, 1-methyl-2-butynyl, 1-methyl-3-butynyl, 2-methyl-3-butynyl, 3-methyl-1-butynyl, 1,1-dimethyl-2-propynyl, 1-ethyl-2-propynyl, 1-hexynyl, 2-hexynyl, 3-hexynyl, 4-hexynyl, 5-hexynyl, 1-methyl-2-pentynyl, 1-methyl-3-pentynyl, 1-methyl-4-pentynyl, 2-methyl-3-pentynyl, 2-methyl-4-pentynyl, 3-methyl-1-pentynyl, 3-methyl-4-pentynyl, 4-methyl-1-pentynyl, 4-methyl-2-pentynyl, 1,1-dimethyl-2-butynyl, 1,1-dimethyl-3-butynyl, 1,2-dimethyl-3-butynyl, 2,2-dimethyl-3-butynyl, 3,3-dimethyl-1-butynyl, 1-ethyl-2-butynyl, 1-ethyl-3-butynyl, 2-ethyl-3-butynyl and 1-ethyl-1-methyl-2-propynyl;
[0210] C₃-C₆-haloalkynyl: a C₃-C₆-alkynyl radical as mentioned above which is partially or fully substituted by fluorine, chlorine, bromine and/or iodine, for example 1,1-difluoroprop-2-yn-1-yl, 3-chloroprop-2-yn-1-yl, 3-bromoprop-2-yn-1-yl, 3-iodoprop-2-yn-1-yl, 4-fluorobut-2-yn-1-yl, 4-chlorobut-2-yn-1-yl, 1,1-difluorobut-2-yn-1-yl, 4-iodobut-3-yn-1-yl, 5-fluoropent-3-yn-1-yl, 5-iodopent-4-yn-1-yl, 6-fluorohex-4-yn-1-yl or 6-iodohex-5-yn-1-yl;
[0211] C₁-C₃-alkoxy and also the C₁-C₃-alkoxy moieties of C₁-C₃-alkoxy-C₁-C₃-alkyl, C₁-C₃-alkoxycarbonyl: for example methoxy, ethoxy, propoxy;
[0212] C₁-C₄-alkoxy and also the C₁-C₄-alkoxy moieties of C₁-C₄-alkoxycarbonyl: for example methoxy, ethoxy, propoxy, 1-methylethoxy butoxy, 1-methylpropoxy, 2-methylpropoxy and 1,1-dimethylethoxy;
[0213] C₁-C₆-alkoxy and also the C₁-C₆-alkoxy moieties of C₁-C₆-alkyoxy-C₁-C₆-alkyl, C₁-C₆-alkoxy-C₁-C₆-alkoxy-C₁-C₆-alkyl, di(C₁-C₆-alkoxy)C₁-C₆-alkyl, C₃-C₆-alkenyloxy-C₁-C₆-alkoxy-C₁-C₆-alkyl, C₁-C₆-alkoxycarbonyl-C₁-C₆-alkyl: C₁-C₄-alkoxy as mentioned above, and also, for example, pentoxy, 1-methylbutoxy, 2-methylbutoxy, 3-methoxylbutoxy, 1,1-dimethylpropoxy, 1,2-dimethylpropoxy, 2,2-dimethylpropoxy, 1-ethylpropoxy, hexoxy, 1-methylpentoxy, 2-methylpentoxy, 3-methylpentoxy, 4-methylpentoxy, 1,1-dimethylbutoxy, 1,2-dimethylbutoxy, 1,3-dimethylbutoxy, 2,2-dimethylbutoxy, 2,3-dimethylbutoxy, 3,3-dimethylbutoxy, 1-ethylbutoxy, 2-ethylbutoxy, 1,1,2-trimethylpropoxy, 1,2,2-trimethylpropoxy, 1-ethyl-1-methylpropoxy and 1-ethyl-2-methylpropoxy.
[0214] C₁-C₃-haloalkoxy: a C₁-C₃-alkoxy radical as mentioned above which is partially or fully substituted by fluorine, chlorine, bromine and/or iodine, i.e., for example, fluoromethoxy, difluoromethoxy, trifluoromethoxy, chlorodifluoromethoxy, bromodifluoromethoxy, 2-fluoroethoxy, 2-chloroethoxy, 2-bromomethoxy, 2-iodoethoxy, 2,2-difluoroethoxy, 2,2,2-trifluoroethoxy, 2-chloro-2-fluoroethoxy, 2-chloro-2,2-difluoroethoxy, 2,2-dichloro-2-fluoroethoxy, 2,2,2-trichloroethoxy, pentafluoroethoxy, 2-fluoropropoxy, 3-fluoropropoxy, 2-chloropropoxy, 3-chloropropoxy, 2-bromopropoxy, 3-bromopropoxy, 2,2-difluoropropoxy, 2,3-difluoropropoxy, 2,3-dichloropropoxy, 3,3,3-trifluoropropoxy, 3,3,3-trichloropropoxy, 2,2,3,3,3-pentafluoropropoxy, heptafluoropropoxy, 1-(fluoromethyl)-2-fluoroethoxy, 1-(chloromethyl)-2-chloroethoxy, 1-(bromo-methyl)-2-bromoethoxy;
[0215] C₁-C₄-haloalkoxy: a C₁-C₄-alkoxy radical as mentioned above which is partially or fully substituted by fluorine, chlorine, bromine and/or iodine, i.e., for example, fluoromethoxy, difluoromethoxy, trifluoromethoxy, chlorodifluoromethoxy, bromodifluoromethoxy, 2-fluoroethoxy, 2-chloroethoxy, 2-bromomethoxy, 2-iodoethoxy, 2,2-difluoroethoxy, 2,2,2-trifluoroethoxy, 2-chloro-2-fluoroethoxy, 2-chloro-2,2-difluoroethoxy, 2,2-dichloro-2-fluoroethoxy, 2,2,2-trichloroethoxy, pentafluoroethoxy, 2-fluoropropoxy, 3-fluoropropoxy, 2-chloropropoxy, 3-chloropropoxy, 2-bromopropoxy, 3-bromopropoxy, 2,2-difluoropropoxy, 2,3-difluoropropoxy, 2,3-dichloropropoxy, 3,3,3-trifluoropropoxy, 3,3,3-trichloropropoxy, 2,2,3,3,3-pentafluoropropoxy, heptafluoropropoxy, 1-(fluoromethyl)-2-fluoroethoxy, 1-(chloromethyl)-2-chloroethoxy, 1-(bromo-methyl)-2-bromoethoxy, 4-fluorobutoxy, 4-chlorobutoxy, 4-bromobutoxy and nonafluorobutoxy;
[0216] C₁-C₆-haloalkoxy and also the C₁-C₆-haloalkoxy moieties of C₁-C₆-haloalkoxy-C₁-C₆-alkyl, C₁-C₆-haloalkoxycarbonyl-C₁-C₆-alkyl: a C₁-C₄-haloalkoxy as mentioned above, and also, for example, 5-fluoropentoxy, 5-chloropentoxy, 5-bromopentoxy, 5-iodopentoxy, undecafluoropentoxy, 6-fluorohexoxy, 6-chlorohexoxy, 6-bromohexoxy, 6-iodohexoxy and dodecafluorohexoxy;
[0217] C₁-C₃-alkylthio: for example methylthio, ethylthio, propylthio, 1-methylethylthio;
[0218] C₁-C₄-alkylthio: for example methylthio, ethylthio, propylthio, 1-methylethylthio, butylthio, 1-methylpropylthio, 2-methylpropylthio and 1,1-dimethylethylthio;
[0219] C₁-C₆-alkylthio and also the C₁-C₆-alkylthio moieties of C₁-C₆-alkylthio-C₁-C₆-alkyl: C₁-C₄-alkylthio as mentioned above, and also, for example, pentylthio, 1-methylbutylthio, 2-methyl-butylthio, 3-methylbutylthio, 2,2-dimethylpropylthio, 1-ethylpropylthio, hexylthio, 1,1-di-methylpropylthio, 1,2-dimethylpropylthio, 1-methylpentylthio, 2-methylpentylthio, 3-methyl-pentylthio, 4-methylpentylthio, 1,1-dimethylbutylthio, 1,2-dimethylbutylthio, 1,3-dimethylbutylthio, 2,2-dimethylbutylthio, 2,3-dimethylbutylthio, 3,3-dimethylbutylthio, 1-ethylbutylthio, 2-ethylbutylthio, 1,1,2-trimethylpropylthio, 1,2,2-trimethylpropylthio, 1-ethyl-1-methylpropylthio and 1-ethyl-2-methylpropylthio;
[0220] C₁-C₆-alkylsulfinyl (C₁-C₆-alkyl-S(═O)—) and also the C₁-C₆-alkylsulfinyl moieties of C₁-C₆-alkylsulfinyl-C₁-C₆-alkyl: for example methylsulfinyl, ethylsulfinyl, propylsulfinyl, 1-me-thylethylsulfinyl, butylsulfinyl, 1-methylpropylsulfinyl, 2-methylpropylsulfinyl, 1,1-di-methylethylsulfinyl, pentylsulfinyl, 1-methylbutylsulfinyl, 2-methylbutylsulfinyl, 3-methylbutylsulfinyl, 2,2-dimethylpropylsulfinyl, 1-ethylpropylsulfinyl, 1,1-dimethylpropylsulfinyl, 1,2-dimethylpropylsulfinyl, hexylsulfinyl, 1-methylpentylsulfinyl, 2-methylpentylsulfinyl, 3-methylpentylsulfinyl, 4-methylpentyl-sulfinyl, 1,1-dimethylbutylsulfinyl, 1,2-dimethylbutylsulfinyl, 1,3-dimethylbutyl-sulfinyl, 2,2-dimethylbutylsulfinyl, 2,3-dimethylbutylsulfinyl, 3,3-dimethylbutyl-sulfinyl, 1-ethylbutylsulfinyl, 2-ethylbutylsulfinyl, 1,1,2-trimethylpropylsulfinyl, 1,2,2-trimethylpropylsulfinyl, 1-ethyl-1-methylpropylsulfinyl and 1-ethyl-2-methylpropylsulfinyl;
[0221] C₁-C₆-alkylsulfonyl (C₁-C₆-alkyl-S(O)₂—) and also the C₁-C₆-alkylsulfonyl moieties of C₁-C₆-alkylsulfonyl-C₁-C₆-alkyl: for example methylsulfonyl, ethylsulfonyl, propylsulfonyl, 1-methylethylsulfonyl, butylsulfonyl, 1-methylpropylsulfonyl, 2-methyl-propylsulfonyl, 1,1-dimethylethylsulfonyl, pentylsulfonyl, 1-methylbutylsulfonyl, 2-methylbutylsulfonyl, 3-methylbutylsulfonyl, 1,1-dimethylpropylsulfonyl, 1,2-dimethylpropylsulfonyl, 2,2-dimethylpropylsulfonyl, 1-ethylpropylsulfonyl, hexylsulfonyl, 1-methylpentylsulfonyl, 2-methylpentylsulfonyl, 3-methylpentylsulfonyl, 4-methylpentylsulfonyl, 1,1-dimethylbutylsulfonyl, 1,2-dimethylbutylsulfonyl, 1,3-dimethylbutylsulfonyl, 2,2-dimethylbutylsulfonyl, 2,3-dimethyl-butylsulfonyl, 3,3-dimethylbutylsulfonyl, 1-ethylbutylsulfonyl, 2-ethylbutylsulfonyl, 1,1,2-trimethyl-propylsulfonyl, 1,2,2-trimethylpropylsulfonyl, 1-ethyl-1-methylpropylsulfonyl and 1-ethyl-2-methylpropylsulfonyl;
[0222] (C₁-C₃-alkyl)amino: for example methylamino, ethylamino, propylamino, 1-methylethyl-amino;
[0223] (C₁-C₄-alkyl)amino: for example methylamino, ethylamino, propylamino, 1-methylethyl-amino, butylamino, 1-methylpropylamino, 2-methylpropylamino or 1,1-dimethylethylamino;
[0224] (C₁-C₆-alkyl)amino: (C₁-C₄-alkylamino) as mentioned above, and also, for example, pentylamino, 1-methylbutylamino, 2-methylbutylamino, 3-methylbutylamino, 2,2-dimethylpropylamino, 1-ethylpropylamino, hexylamino, 1,1-dimethylpropylamino, 1,2-dimethylpropylamino, 1-methylpentylamino, 2-methylpentylamino, 3-methylpentylamino, 4-methylpentylamino, 1,1-dimethylbutylamino, 1,2-dimethylbutylamino, 1,3-dimethylbutylamino, 2,2-dimethylbutylamino, 2,3-dimethylbutyl-amino 3,3-dimethylbutylamino, 1-ethylbutylamino, 2-ethylbutylamino, 1,1,2-trimethylpropylamino, 1,2,2-trimethyl-propylamino, 1-ethyl-1-methylpropylamino or 1-ethyl-2-methylpropylamino;
[0225] di(C₁-C₆-alkyl)amino: di(C₁-C₄-alkyl)amino as mentioned above, and also, for example, N-methyl-N-pentylamino, N-methyl-N-(1-methylbutyl)amino, N-methyl-N-(2-methylbutyl)amino, N-methyl-N-(3-methylbutyl)amino, N-methyl-N-(2,2-dimethylpropyl)amino, N-methyl-N-(1-ethylpropyl)amino, N-methyl-N-hexylamino, N-methyl-N-(1,1-dimethylpropyl)amino, N-methyl-N-(1,2-dimethylpropyl)amino, N-methyl-N-(1-methylpentyl)amino, N-methyl-N-(2-methylpentyl)amino, N-methyl-N-(3-methylpentyl)amino, N-methyl-N-(4-methylpentyl)amino, N-methyl-N-(1,1-dimethylbutyl)amino, N-methyl-N-(1,2-dimethylbutyl)amino, N-methyl-N-(1,3-dimethylbutyl)amino, N-methyl-N-(2,2-dimethylbutyl)amino, N-methyl-N-(2,3-dimethylbutyl)amino, N-methyl-N-(3,3-dimethylbutyl)amino, N-methyl-N-(1-ethylbutyl)amino, N-methyl-N-(2-ethylbutyl)amino, N-methyl-N-(1,1,2-trimethylpropyl)amino, N-methyl-N-(1,2,2-trimethylpropyl)amino, N-methyl-N-(1-ethyl-1-methylpropyl)amino, N-methyl-N-(1-ethyl-2-methylpropyl)amino, N-ethyl-N-pentylamino, N-ethyl-N-(1-methylbutyl)amino, N-ethyl-N-(2-methylbutyl)amino, N-ethyl-N-(3-methylbutyl)amino, N-ethyl-N-(2,2-dimethylpropyl)amino, N-ethyl-N-(1-ethylpropyl)amino, N-ethyl-N-hexylamino, N-ethyl-N-(1,1-dimethylpropyl)amino, N-ethyl-N-(1,2-dimethylpropyl)amino, N-ethyl-N-(1-methylpentyl)amino, N-ethyl-N-(2-methyl-pentyl)amino, N-ethyl-N-(3-methylpentyl)amino, N-ethyl-N-(4-methylpentyl)amino, N-ethyl-N-(1,1-dimethylbutyl)amino, N-ethyl-N-(1,2-dimethylbutyl)amino, N-ethyl-N-(1,3-dimethylbutyl)amino, N-ethyl-N-(2,2-dimethylbutyl)amino, N-ethyl-N-(2,3-dimethylbutyl)amino, N-ethyl-N-(3,3-dimethylbutyl)amino, N-ethyl-N-(1-ethylbutyl)amino, N-ethyl-N-(2-ethylbutyl)amino, N-ethyl-N-(1,1,2-trimethylpropyl)amino, N-ethyl-N-(1,2,2-trimethylpropyl)amino, N-ethyl-N-(1-ethyl-1-methylpropyl)amino, N-ethyl-N-(1-ethyl-2-methylpropyl)amino, N-propyl-N-pentylamino, N-butyl-N-pentylamino, N,N-dipentylamino, N-propyl-N-hexylamino, N-butyl-N-hexylamino, N-pentyl-N-hexylamino or N,N-dihexylamino;
[0226] C₃-C₆-cycloalkyl and also the cycloalkyl moieties of C₃-C₆-cycloalkyl-C₁-C₆-alkyl: monocyclic saturated hydrocarbons having 3 to 6 ring members, such as cyclopropyl, cyclobutyl, cyclopentyl and cyclohexyl;
[0227] C₃-C₆-heterocyclyl and also the heterocyclyl moieties of C₃-C₆-heterocyclyl-C₁-C₆-alkyl: aliphatic heterocycle having 3 to 6 ring members which, in addition to carbon atoms, contains 1 to 4 nitrogen atoms, or 1 to 3 nitrogen atoms and an oxygen or sulphur atom, or an oxygen or a sulphur atom, for example
   three- or four-membered heterocycles like 2-oxetanyl, 3-oxetanyl, 2-thietanyl, 3-thietanyl, 1-azetidinyl, 2-azetidinyl, 1-azetinyl, 2-azetinyl; five-membered saturated heterocycles like 2-tetrahydrofuranyl, 3-tetrahydrofuranyl, 2-tetrahydrothienyl, 3-tetrahydrothienyl, 1-pyrrolidinyl,2-pyrrolidinyl, 3-pyrrolidinyl, 3-isoxazolidinyl, 4-isoxazolidinyl, 5-isoxazolidinyl, 2-isothiazolidinyl, 3-isothiazolidinyl, 4-isothiazolidinyl, 5-isothiazolidinyl, 1-pyrazolidinyl, 3-pyrazolidinyl, 4-pyrazolidinyl, 5-pyrazolidinyl, 2-oxazolidinyl, 4-oxazolidinyl, 5-oxazolidinyl, 2-thiazolidinyl, 4-thiazolidinyl, 5-thiazolidinyl, 1-imidazolidinyl, 2-imidazolidinyl, 4-imidazolidinyl, 3-oxazolidinyl, 1,2,4-oxadiazolidin-3-yl, 1,2,4-oxadiazolidin-5-yl, 3-thiazolidinyl, 1,2,4-thiadiazolidin-3-yl, 1,2,4-thiadiazolidin-5-yl, 1,2,4-triazolidin-3-yl, 1,2,4-oxadiazolidin-2-yl, 1,2,4-oxadiazolidin-4-yl, 1,3,4-oxadiazolidin-2-yl, 1,2,4-thiadiazolidin-2-yl, 1,2,4-thiadiazolidin-4-yl, 1,3,4-thiadiazolidin-2-yl, 1,2,4-triazolidin-1-yl, 1,3,4-triazolidin-2-yl; six-membered saturated heterocycles like 1-piperidinyl, 2-piperidinyl, 3-piperidinyl, 4-piperidinyl, 1,3-dioxan-5-yl, 1,4-dioxanyl, 1,3-dithian-5-yl, 1,3-dithianyl, 1,3-oxathian-5-yl, 1,4-oxathianyl, 2-tetrahydropyranyl, 3-tetrahydopyranyl, 4-tetrahydropyranyl, 2-tetrahydrothiopyranyl, 3-tetrahydrothiopyranyl,4-tetrahydrothiopyranyl, 1-hexahydropyridazinyl, 3-hexahydropyridazinyl, 4-hexahydropyridazinyl, 1-hexahydropyrimidinyl, 2-hexahydropyrimidinyl, 4-hexahydropyrimidinyl, 5-hexahydropyrimidinyl, 1-piperazinyl, 2-piperazinyl, 1,3,5-hexahydrotriazin-1-yl, 1,3,5-hexahydrotriazin-2-yl, 1,2,4-hexahydrotriazin-1-yl, 1,2,4-hexahydrotriazin-3-yl, tetrahydro-1,3-oxazin-1-yl, tetrahydro-1,3-oxazin-2-yl, tetrahydro-1,3-oxazin-6-yl, 1-morpholinyl, 2-morpholinyl, 3-morpholinyl;
[0228] 5- or 6 membered heteroaryl: aromatic heteroaryl having 5 or 6 ring members which, in addition to carbon atoms, contains 1 to 4 nitrogen atoms, or 1 to 3 nitrogen atoms and an oxygen or sulphur atom, or an oxygen or a sulphur atom, for example 5-membered aromatic rings like furyl (for example 2-furyl, 3-furyl), thienyl (for example 2-thienyl, 3-thienyl), pyrrolyl (for example pyrrol-2-yl, pyrrol-3-yl), pyrazolyl (for example pyrazol-3-yl, pyrazol-4-yl), isoxazolyl (for example isoxazol-3-yl, isoxazol-4-yl, isoxazol-5-yl), isothiazolyl (for example isothiazol-3-yl, isothiazol-4-yl, isothiazol-5-yl), imidazolyl (for example imidazole-2-yl, imidazole-4-yl), oxazolyl (for example oxazol-2-yl, oxazol-4-yl, oxazol-5-yl), thiazolyl (for example thiazol-2-yl, thiazol-4-yl, thiazol-5-yl), oxadiazolyl (for example 1,2,3-oxadiazol-4-yl, 1,2,3-oxadiazol-5-yl, 1,2,4-oxadiazol-3-yl, 1,2,4-oxadiazol-5-yl, 1,3,4-oxadiazol-2-yl), thiadiazolyl (for example 1,2,3-thiadiazol-4-yl, 1,2,3-thiadiazol-5-yl, 1,2,4-thiadiazol-3-yl, 1,2,4-thiadiazol-5-yl, 1,3,4-thiadiazolyl-2-yl), triazolyl (for example 1,2,3-triazol-4-yl, 1,2,4-triazol-3-yl); 1-tetrazolyl; 6-membered aromatic rings like pyridyl (for example pyridine-2-yl, pyridine-3-yl, pyridine-4-yl), pyrazinyl (for example pyridazin-3-yl, pyridazin-4-yl), pyrimidinyl (for example pyrimidin-2-yl, pyrimidin-4-yl, pyrimidin-5-yl), pyrazin-2-yl, triazinyl (for example 1,3,5-triazin-2-yl, 1,2,4-triazin-3-yl, 1,2,4-triazin-5-yl, 1,2,4-triazin-6-yl);
[0229] 3- to 7-membered carbocyclus: a three- to seven-membered monocyclic, saturated, partial unsaturated or aromatic cycle having three to seven ring members which comprises apart from carbon atoms optionally one or two ring members selected from the group consisting of —N(R¹¹)—, —N═N—, —C(═O)—, —O— and —S—.

[0230] The preferred embodiments of the invention mentioned herein below shall be understood as being preferred either independently from each other or in combination with one another.

[0231] According to a preferred embodiment of the invention preference is also given to those phenyluracils of formula (I), wherein the variables, either independently of one another or in combination with one another, have the following meanings:

[0232] Preferred are the phenyluracils of formula (I) wherein
[0233] R¹ is NH₂ or C₁-C₆-alkyl;
   [0234] preferably is NH₂ or C₁-C₄-alkyl;
   [0235] particularly preferred is NH₂ or CH₃;
   [0236] also preferably is C₁-C₆-alkyl;
   [0237] particularly preferred is C₁-C₄-alkyl;
   [0238] especially preferred is CH₃.

[0239] Also preferred are the phenyluracils of formula (I) wherein
[0240] R² is C₁-C₆-alkyl or C₁-C₆-haloalkyl;
   [0241] preferably is C₁-C₄-alkyl or C₁-C₄-haloalkyl;
   [0242] more preferred is C₁-C₄-haloalkyl;
   [0243] particularly preferred is C₁-C₂-haloalkyl;
   [0244] especially preferred is CF₃.

[0245] Also preferred are the phenyluracils of formula (I) wherein
[0246] R³ is H;
   [0247] also preferably is C₁-C₆-alkyl,
   [0248] particularly preferred is C₁-C₄-alkyl,
   [0249] especially preferred is CH₃;
   [0250] also preferably is H or C₁-C₄-alkyl;
   [0251] particularly preferred is H or CH₃.

[0252] Also preferred are the phenyluracils of formula (I) wherein
[0253] R⁴ is H, F or Cl;
   [0254] particularly preferred is H or F;
   [0255] especially preferred is H;
   [0256] also particularly preferred is H or Cl;
   [0257] especially preferred is Cl;
   [0258] also particularly preferred is F or Cl;
   [0259] especially preferred is F.

[0260] Also preferred are the phenyluracils of formula (I) wherein
[0261] R⁵ is halogen, C₁-C₃-haloalkyl, C₁-C₃-alkoxy, C₁-C₃-haloalkoxy, C₁-C₃-alkylthio or C₁-C₃-alkoxycarbonyl;
   [0262] preferably is halogen, C₁-C₃-haloalkyl, C₁-C₃-alkoxy or C₁-C₃-alkylthio;
   [0263] particularly preferred is halogen, C₁-C₃-alkoxy or C₁-C₃-alkylthio;
   [0264] more preferred is F, OCH₃ or SCH₃;
   [0265] also particularly preferred is C₁-C₃-haloalkyl or C₁-C₃-alkoxy;
   [0266] especially preferred is C₁-C₃-alkoxy;
   [0267] more preferred is OCH₃.

[0268] Also preferred are the phenyluracils of formula (I) wherein
[0269] R⁶ is H, C₁-C₃-alkyl or halogen;
   [0270] particularly preferred is H or halogen;
   [0271] especially preferred is H or F;
   [0272] more preferred is H.

[0273] Also preferred are the phenyluracils of formula (I) wherein
[0274] R⁷ is OR⁸, SR⁸, NR⁸OR⁹, NR⁸S(O)₂R⁹ or NR⁸S(O)₂NR⁹R¹⁰;
   [0275] particularly preferred is OR⁸, SR⁸, NR⁸OR⁹ or NR⁸S(O)₂R⁹;
   [0276] especially preferred OR⁸, NR⁸OR⁹ or NR⁸S(O)₂R⁹;
   [0277] especially preferred is OR⁸ or NR⁸S(O)₂R⁹.

[0278] Also preferred are the phenyluracils of formula (I) wherein
[0279] R⁷ is OR⁸,
   [0280] wherein R⁸ is as defined below as preferred;
      [0281] is preferably C₁-C₆-alkyl;
      [0282] is particularly preferred C₁-C₄-alkyl;
      [0283] is especially preferred CH₃, C₂H₅, n-propyl, CH(CH₃)₂, n-butyl, CH(CH₃)—C₂H₅, CH₂—CH(CH₃)₂ or C(CH₃)₃;
      [0284] is more preferred CH₃ or C₂H₅;
      [0285] is most preferred CH₃;
      [0286] is also most preferred C₂H.

[0287] Also preferred are the phenyluracils of formula (I) wherein
[0288] R⁸ is hydrogen, C₁-C₆-alkyl, C₃-C₆-alkenyl, C₃-C₆-alkynyl, C₁-C₆-haloalkyl, C₃-C₆-haloalkenyl, C₃-C₆-haloalkynyl, C₁-C₆-cyanoalkyl, C₁-C₆-alkoxy-C₁-C₆-alkyl, C₁-C₆-alkoxy-C₁-C₆-alkoxy-C₁-C₆-alkyl, di(C₁-C₆-alkoxy)C₁-C₆-alkyl, C₁-C₆-haloalkoxy-C₁-C₆-alkyl, C₃-C₆-alkenyloxy-C₁-C₆-alkyl, C₃-C₆-haloalkenyloxy-C₁-C₆-alkyl, C₃-C₆-alkenyloxy-C₁-C₆-alkoxy-C₁-C₆-alkyl, C₁-C₆-alkylthio-C₁-C₆-alkyl, C₁-C₆-alkylsulfinyl-C₁-C₆-alkyl, C₁-C₆-alkylsulfonyl-C₁-C₆-alkyl, C₁-C₆-alkylcarbonyl-C₁-C₆-alkyl, C₁-C₆-alkoxycarbonyl-C₁-C₆-alkyl, C₁-C₆-haloalkoxy-carbonyl-C₁-C₆-alkyl, C₃-C₆-alkenyloxycarbonyl-C₁-C₆-alkyl, C₃-C₆-alkynyloxycarbonyl-C₁-C₆-alkyl, amino, (C₁-C₆-alkyl)amino, di(C₁-C₆-alkyl)amino, (C₁-C₆-alkylcarbonyl)amino, amino-C₁-C₆-alkyl, (C₁-C₆-alkyl)amino-C₁-C₆-alkyl, di(C₁-C₆-alkyl)amino-C₁-C₆-alkyl, aminocarbonyl-C₁-C₆-alkyl, (C₁-C₆-alkyl)aminocarbonyl-C₁-C₆-alkyl, di(C₁-C₆-alkyl)aminocarbonyl-C₁-C₆-alkyl,
   [0289] —N═CR¹¹R¹²
      [0290] wherein R¹¹ and R¹² independently of one another are H, C₁-C₄-alkyl or phenyl; C₃-C₆-cycloalkyl, C₃-C₆-cycloalkyl-C₁-C₆-alkyl, C₃-C₆-heterocyclyl, phenyl, phenyl-C₁-C₄-alkyl or a 5- or 6 membered heteroaryl,
      [0291] wherein each cycloalkyl, heterocyclyl, phenyl or heteroaryl ring can be substituted by one to four substituents selected from R¹³ or a 3- to 7-membered carbocyclus,
         [0292] which carbocyclus optionally has in addition to carbon atoms one or two ring members selected from the group consisting of —N(R¹¹)—, —N═N—, —C(═O)—, —O— and —S—, and
         [0293] which carbocyclus is optionally substituted with one to four substituents selected from R¹³,
         wherein R¹³ is halogen, NO₂, CN, C₁-C₄-alkyl, C₁-C₄-haloalkyl, C₁-C₄-alkoxy or C₁-C₄-alkoxycarbonyl;
   [0294] preferably is hydrogen, C₁-C₆-alkyl, C₃-C₆-alkenyl, C₃-C₆-alkynyl, C₁-C₆-haloalkyl, C₁-C₆-alkoxy-C₁-C₆-alkyl, di(C₁-C₆-alkoxy)C₁-C₆-alkyl, C₁-C₆-alkylcarbonyl-C₁-C₆-alkyl, C₁-C₆-alkoxycarbonyl-C₁-C₆-alkyl or C₃-C₆-cycloalkyl-C₁-C₆-alkyl;
   [0295] particularly preferred is hydrogen, C₁-C₆-alkyl, C₃-C₆-alkenyl, C₃-C₆-alkynyl, C₁-C₆-haloalkyl or C₁-C₆-alkoxy-C₁-C₆-alkyl;
   [0296] also particularly preferred is hydrogen, C₁-C₆-alkyl, C₃-C₆-alkenyl, C₃-C₆-alkynyl or C₁-C₆-alkoxy-C₁-C₆-alkyl;
   [0297] especially preferred is hydrogen, C₁-C₆-alkyl, or C₃-C₆-alkenyl;
   [0298] more preferred is hydrogen, CH₃, C₂H₅ or CH₂CH═CH₂;
   [0299] most preferred is hydrogen, CH₃ or C₂H₅.

[0300] Also preferred are the phenyluracils of formula (I) wherein
[0301] R⁹ is C₁-C₆-alkyl or C₃-C₆-cycloalkyl;
   [0302] particularly preferred is C₁-C₆-alkyl;
   [0303] more preferred is CH₃.

[0304] Also preferred are the phenyluracils of formula (I) wherein
[0305] R¹⁰ is C₁-C₆-alkyl or C₃-C₆-cycloalkyl;
   [0306] particularly preferred is C₁-C₆-alkyl;
   [0307] more preferred is CH₃, C₂H₅ or CH(CH₃)₂.

[0308] Also preferred are the phenyluracils of formula (I) wherein
[0309] R¹¹ is phenyl or C₁-C₄-alkyl;
   [0310] particularly preferred is phenyl or CH₃;
   [0311] also particularly preferred is phenyl;
   [0312] also particularly preferred is C₁-C₄-alkyl.

[0313] Also preferred are the phenyluracils of formula (I) wherein
[0314] R¹² is phenyl or C₁-C₄-alkyl;
   [0315] particularly preferred is phenyl or CH₃;
   [0316] also particularly preferred is phenyl;
   [0317] also particularly preferred is C₁-C₄-alkyl.

[0318] Also preferred are the phenyluracils of formula (I) wherein
[0319] R¹³ is halogen, C₁-C₄-alkyl, C₁-C₄-alkoxy or C₁-C₄-alkoxycarbonyl;
   [0320] particularly preferred is halogen or C₁-C₄-alkyl;
   [0321] especially preferred is F, Cl or CH₃;
   [0322] also particularly preferred is halogen;
   [0323] especially preferred is F or C;
   [0324] also particularly preferred is C₁-C₆-alkyl;
   [0325] especially preferred is CH₃.

[0326] Also preferred are the phenyluracils of formula (I) wherein
[0327] n is 1 or 2;
   [0328] particularly preferred is 2;
   [0329] also particularly preferred is 1.

[0330] Also preferred are the phenyluracils of formula (I) wherein
[0331] Q is O, S, SO, SO₂, NH or (C₁-C₃-alkyl)N;
   [0332] preferably is O or S;
   [0333] particularly preferred is O.

[0334] Also preferred are the phenyluracils of formula (I) wherein
[0335] W is O,
   [0336] also preferably is S.

[0337] Also preferred are the phenyluracils of formula (I) wherein
[0338] X is O,
   [0339] also preferably is S.

[0340] Also preferred are the phenyluracils of formula (I) wherein
[0341] Y is O,
   [0342] also preferably is S.

[0343] Also preferred are the phenyluracils of formula (I) wherein
[0344] Z is phenyl or pyridyl,
   [0345] each of which is optionally substituted by 1 to 4 substituents selected from the group consisting of halogen, CN, C₁-C₆-alkyl, C₁-C₆-haloalkyl, C₁-C₆-alkoxy and C₁-C₆-haloalkoxy;
   [0346] preferably is phenyl,
   [0347] which is optionally substituted by 1 to 4 substituents selected from the group consisting of halogen, CN, C₁-C₆-alkyl, C₁-C₆-haloalkyl, C₁-C₆-alkoxy and C₁-C₆-haloalkoxy;
   [0348] also preferably is pyridyl,
   [0349] which is optionally substituted by 1 to 4 substituents selected from the group consisting of halogen, CN, C₁-C₆-alkyl, C₁-C₆-haloalkyl, C₁-C₆-alkoxy and C₁-C₆-haloalkoxy.

[0350] Also preferred are the phenyluracils of formula (I) wherein
[0351] Z is phenyl or pyridyl,
   [0352] each of which is optionally substituted by 1 to 4 substituents selected from the group consisting of halogen, CN, C₁-C₆-alkyl, C₁-C₆-haloalkyl, C₁-C₆-alkoxy and C₁-C₆-haloalkoxy;
   [0353] preferably is phenyl or pyridyl,
   [0354] each of which is optionally substituted by 1 to 4 substituents selected from the group consisting of halogen, C₁-C₆-alkyl, C₁-C₆-haloalkyl, C₁-C₆-alkoxy or C₁-C₆-haloalkoxy;
   [0355] particularly preferred is phenyl or pyridyl,
   [0356] each of which is optionally substituted by 1 to 4 substituents selected from the group consisting of halogen or C₁-C₆-alkyl;
   [0357] especially preferred is phenyl or pyridyl,
   [0358] each of which is optionally substituted by 1 to 4 substituents selected from the group consisting of F, Cl or CH₃;
   [0359] more preferred is phenyl or pyridyl,
   [0360] each of which is unsubstituted.

[0361] Also preferred are the phenyluracils of formula (I) wherein
[0362] Z is phenyl,
   [0363] which is optionally substituted by 1 to 4 substituents selected from the group consisting of halogen, CN, C₁-C₆-alkyl, C₁-C₆-haloalkyl, C₁-C₆-alkoxy and C₁-C₆-haloalkoxy;
   [0364] preferably is phenyl,
   [0365] which is optionally substituted by 1 to 4 substituents selected from the group consisting of halogen, C₁-C₆-alkyl, C₁-C₆-haloalkyl, C₁-C₆-alkoxy or C₁-C₆-haloalkoxy;
   [0366] particularly preferred is phenyl,
   [0367] which is optionally substituted by 1 to 4 substituents selected from the group consisting of halogen or C₁-C₆-alkyl;
   [0368] especially preferred is phenyl
   [0369] which is optionally substituted by 1 to 4 substituents selected from the group consisting of F, Cl or CH₃;
   [0370] more preferred is unsubstituted phenyl.

[0371] Also preferred are the phenyluracils of formula (I) wherein
[0372] Z is pyridyl,
   [0373] which is optionally substituted by 1 to 3 substituents selected from the group consisting of halogen, CN, C₁-C₆-alkyl, C₁-C₆-haloalkyl, C₁-C₆-alkoxy and C₁-C₆-haloalkoxy;
   [0374] preferably is pyridyl,
   [0375] which is optionally substituted by 1 to 3 substituents selected from the group consisting of halogen, C₁-C₆-alkyl, C₁-C₆-haloalkyl, C₁-C₆-alkoxy or C₁-C₆-haloalkoxy;
   [0376] particularly preferred is pyridyl,
   [0377] which is optionally substituted by 1 to 3 substituents selected from the group consisting of halogen or C₁-C₆-alkyl;
   [0378] especially preferred is pyridyl,
   [0379] which is optionally substituted by 1 to 3 substituents selected from the group consisting of F, C or CH₃;
   [0380] more preferred is unsubstituted pyridyl.

[0381] Also preferred are the phenyluracils of formula (I) wherein
[0382] Z is selected from the group consisting of Z¹ to Z²⁹

[chemical structure]

[chemical structure]

[chemical structure]

[chemical structure]

[chemical structure]

[chemical structure]

[chemical structure]

[0383] wherein
[0384] * denotes the point of attachment of Z to X;
[0385] ** denotes the point of attachment of Z to Q; and
[0386] R^{a}, R^{b}, R^{c}, R^{d} and R^{e} independently of one another are
   [0387] H, halogen, CN, C₁-C₆-alkyl, C₁-C₆-haloalkyl, C₁-C₆-alkoxy, C₁-C₆-haloalkoxy;
   [0388] preferably H, halogen, C₁-C₆-alkyl, C₁-C₆-haloalkyl, C₁-C₆-alkoxy or C₁-C₆-haloalkoxy;
   [0389] particularly preferred H, halogen or C₁-C₆-alkyl;
   [0390] especially preferred H, F, Cl, or CH₃;
   [0391] more preferred H.

[0392] Also preferred are the phenyluracils of formula (I) wherein
[0393] Z is selected from the group consisting of Z¹, Z², Z³, Z⁴, Z⁵, Z⁶, Z⁷, Z⁸, Z⁹, Z¹⁰, Z¹¹, Z¹², Z¹³ and Z²¹ as defined above;
   [0394] particularly preferred is selected from the group consisting of Z¹, Z², Z⁴, Z⁵, Z⁶, Z⁷, Z⁸, Z⁹, Z¹⁰, Z¹¹ and Z²¹ as defined above;
   [0395] more particularly preferred is selected from the group consisting of Z¹, Z⁴, Z⁵, Z⁶, Z⁷ and Z²¹ as defined above;
   [0396] especially preferred is selected from the group consisting of Z¹, Z⁴, Z⁵, Z⁶ and Z⁷ as defined above;
   [0397] more preferred is selected from the group consisting of Z¹ and Z⁷ as defined above.

[0398] Also preferred are the phenyluracils of formula (I) wherein
[0399] Z is selected from the group consisting of Z¹, Z², Z³, Z⁴, Z⁵, Z⁶, Z⁷, Z⁸, Z⁹, Z¹⁰, Z¹¹, Z¹², Z¹³ and Z²¹ as defined above; wherein
   [0400] R^{a}, R^{b}, R^{c}, R^{d} and R^{e} independently of one another are
      [0401] H, halogen, CN, C₁-C₆-alkyl, C₁-C₆-haloalkyl, C₁-C₆-alkoxy, C₁-C₆-haloalkoxy;
      [0402] preferably H, halogen, C₁-C₆-alkyl, C₁-C₆-haloalkyl, C₁-C₆-alkoxy or C₁-C₆-haloalkoxy;
      [0403] particularly preferred H, halogen or C₁-C₆-alkyl;
      [0404] especially preferred H, F, Cl, or CH₃;
      [0405] more preferred H;
   [0406] particularly preferred is selected from the group consisting of Z¹, Z², Z⁴, Z⁵, Z⁶, Z⁷, Z⁸, Z⁹, Z¹⁰, Z¹¹ and Z²¹ as defined above, wherein
   [0407] R^{a}, R^{b}, R^{c}, R^{d} and R^{e} independently of one another are
      [0408] H, halogen, CN, C₁-C₆-alkyl, C₁-C₆-haloalkyl, C₁-C₆-alkoxy, C₁-C₆-haloalkoxy;
      [0409] preferably H, halogen, C₁-C₆-alkyl, C₁-C₆-haloalkyl, C₁-C₆-alkoxy or C₁-C₆-haloalkoxy;
      [0410] particularly preferred H, halogen or C₁-C₆-alkyl;
      [0411] especially preferred H, F, C, or CH₃;
      [0412] more preferred H;
   [0413] more particularly preferred is selected from the group consisting of Z¹, Z⁴, Z⁵, Z⁶, Z⁷, and Z²¹ as defined above, wherein
   [0414] R^{a}, R^{b}, R^{c}, R^{d} and R^{e} independently of one another are
      [0415] H, halogen, CN, C₁-C₆-alkyl, C₁-C₆-haloalkyl, C₁-C₆-alkoxy, C₁-C₆-haloalkoxy;
      [0416] preferably H, halogen, C₁-C₆-alkyl, C₁-C₆-haloalkyl, C₁-C₆-alkoxy or C₁-C₆-haloalkoxy;
      [0417] particularly preferred H, halogen or C₁-C₆-alkyl;
      [0418] especially preferred H, F, C, or CH₃;
      [0419] more preferred H;
   [0420] especially preferred is selected from the group consisting of Z¹, Z⁴, Z⁵, Z⁶ and Z⁷ as defined above, wherein
   [0421] R^{a}, R^{b}, R^{c}, R^{d} and R^{e} independently of one another are
      [0422] H, halogen, CN, C₁-C₆-alkyl, C₁-C₆-haloalkyl, C₁-C₆-alkoxy, C₁-C₆-haloalkoxy;
      [0423] preferably H, halogen, C₁-C₆-alkyl, C₁-C₆-haloalkyl, C₁-C₆-alkoxy or C₁-C₆-haloalkoxy;
      [0424] particularly preferred H, halogen or C₁-C₆-alkyl;
      [0425] especially preferred H, F, C, or CH₃;
      [0426] more preferred H;
   [0427] more preferred is selected from the group consisting of Z¹ and Z⁷ as defined above, wherein
   [0428] R^{a}, R^{b}, R^{c}, R^{d} and R^{e} independently of one another are
      [0429] H, halogen, CN, C₁-C₆-alkyl, C₁-C₆-haloalkyl, C₁-C₆-alkoxy, C₁-C₆-haloalkoxy;
      [0430] preferably H, halogen, C₁-C₆-alkyl, C₁-C₆-haloalkyl, C₁-C₆-alkoxy or C₁-C₆-haloalkoxy;
      [0431] particularly preferred H, halogen or C₁-C₆-alkyl;
      [0432] especially preferred H, F, C, or CH₃;
      [0433] more preferred H.

[0434] Also preferred are the phenyluracils of formula (I) wherein
[0435] R¹ is C₁-C₆-alkyl,
[0436] R² is C₁-C₄-haloalkyl,
[0437] R³ is H,
[0438] R⁴ is H, F or Cl, and
[0439] Y is O.

[0440] Also preferred are the phenyluracils of formula (I) wherein
[0441] R¹ is C₁-C₆-alkyl,
[0442] R² is C₁-C₄-haloalkyl,
[0443] R³ is H,
[0444] R⁴ is H or F, and
[0445] Y is O.

[0446] Also preferred are the phenyluracils of formula (I) wherein
[0447] R⁵ is C₁-C₃-alkoxy, and
[0448] R⁶ is H.

[0449] Also preferred are the phenyluracils of formula (I) wherein
[0450] R⁷ is OR⁸, NR⁸OR⁹ or NR⁸S(O)₂R⁹, wherein
   [0451] R⁸ is hydrogen, C₁-C₆-alkyl, C₃-C₆-alkenyl, C₃-C₆-alkynyl, C₁-C₆-haloalkyl, C₁-C₆-alkoxy-C₁-C₆-alkyl, di(C₁-C₆-alkoxy)C₁-C₆-alkyl, C₁-C₆-alkylcarbonyl-C₁-C₆-alkyl, C₁-C₆-alkoxycarbonyl-C₁-C₆-alkyl or C₃-C₆-cycloalkyl-C₁-C₆-alkyl; and
   [0452] R⁹ is C₁-C₆-alkyl.

[0453] Also preferred are the phenyluracils of formula (I) wherein n is 1.

[0454] Also preferred are the phenyluracils of formula (I) wherein Q, W and X are 0.

[0455] Also preferred are the phenyluracils of formula (I) wherein
[0456] R¹ is NH₂ or C₁-C₆-alkyl;
[0457] R² is C₁-C₄-haloalkyl;
[0458] R³ is H;
[0459] R⁴ is H, F or Cl;
[0460] R⁵ is halogen, C₁-C₃-haloalkyl, C₁-C₃-alkoxy or C₁-C₃-alkylthio;
[0461] R⁶ is H;
[0462] R⁷ is OR⁸, SR⁸, NR⁸OR⁹ or NR⁸S(O)₂R⁹; wherein
   [0463] R⁸ is hydrogen, C₁-C₆-alkyl, C₃-C₆-alkenyl, C₃-C₆-alkynyl, C₁-C₆-haloalkyl, C₃-C₆-haloalkenyl, C₃-C₆-haloalkynyl, C₁-C₆-cyanoalkyl, C₁-C₆-alkoxy-C₁-C₆-alkyl, C₁-C₆-alkoxy-C₁-C₆-alkoxy-C₁-C₆-alkyl, di(C₁-C₆-alkoxy)C₁-C₆-alkyl, C₁-C₆-haloalkoxy-C₁-C₆-alkyl, C₃-C₆-alkenyloxy-C₁-C₆-alkyl, C₃-C₆-haloalkenyloxy-C₁-C₆-alkyl, C₃-C₆-alkenyloxy-C₁-C₆-alkoxy-C₁-C₆-alkyl, C₁-C₆-alkylthio-C₁-C₆-alkyl, C₁-C₆-alkylsulfinyl-C₁-C₆-alkyl, C₁-C₆-alkylsulfonyl-C₁-C₆-alkyl, C₁-C₆-alkylcarbonyl-C₁-C₆-alkyl, C₁-C₆-alkoxycarbonyl-C₁-C₆-alkyl, C₁-C₆-haloalkoxycarbonyl-C₁-C₆-alkyl, C₃-C₆-alkenyloxycarbonyl-C₁-C₆-alkyl, amino, (C₁-C₆-alkyl)amino, di(C₁-C₆-alkyl)amino, (C₁-C₆-alkylcarbonyl)amino, amino-C₁-C₆-alkyl, (C₁-C₆-alkyl)amino-C₁-C₆-alkyl, di(C₁-C₆-alkyl)amino-C₁-C₆-alkyl, aminocarbonyl-C₁-C₆-alkyl, (C₁-C₆-alkyl)amino-carbonyl-C₁-C₆-alkyl, di(C₁-C₆-alkyl)aminocarbonyl-C₁-C₆-alkyl, —N═CR¹¹R¹², C₃-C₆-cycloalkyl, C₃-C₆-cycloalkyl-C₁-C₆-alkyl, C₃-C₆-heterocyclyl, phenyl, phenyl-C₁-C₄-alkyl or a 5- or 6 membered heteroaryl,
      [0464] wherein each cycloalkyl, heterocyclyl, phenyl or heteroaryl ring can be substituted by one to four substituents selected from R¹³ or a 3- to 7-membered carbocyclus,
         [0465] which carbocyclus optionally has in addition to carbon atoms one or two ring members selected from the group consisting of —N(R¹¹)—, —N═N—, —C(═O)—, —O— and —S—, and
         [0466] which carbocyclus is optionally substituted with one to four substituents selected from R¹³;
   [0467] R⁹ is C₁-C₆-alkyl;
      [0468] R¹¹ is phenyl or CH₃;
      [0469] R¹² is phenyl or CH₃;
      [0470] R¹³ is halogen or C₁-C₄-alkyl;
   [0471] n is 1 or 2;
   [0472] Q is O, S, SO, SO₂, NH or (C₁-C₃-alkyl)N;
   [0473] W is O;
   [0474] X is O;
   [0475] Y is O;
   [0476] Z is Z¹, Z², Z³, Z⁴, Z⁵, Z⁶, Z⁷, Z⁸, Z⁹, Z¹⁰, Z¹¹, Z¹², Z¹³ and Z²¹ as defined above, wherein R^{a}, R^{b}, R^{c}, R^{d} and R^{e} independently of one another are H, halogen, CN, C₁-C₆-alkyl, C₁-C₆-haloalkyl, C₁-C₆-alkoxy, C₁-C₆-haloalkoxy;
[0477] particularly preferred are the phenyluracils of formula (I) wherein
[0478] R¹ is NH₂ or C₁-C₄-alkyl;
[0479] R² is C₁-C₄-haloalkyl;
[0480] R³ is H;
[0481] R⁴ is H, F or Cl;
[0482] R⁵ is C₁-C₃-haloalkyl or C₁-C₃-alkoxy;
[0483] R⁶ is H;
[0484] R⁷ OR⁸, NR⁸OR⁹ or NR⁸S(O)₂R⁹; wherein
   [0485] R⁸ is hydrogen, C₁-C₆-alkyl, C₃-C₆-alkenyl, C₃-C₆-alkynyl, C₁-C₆-haloalkyl, C₁-C₆-alkoxy-C₁-C₆-alkyl, di(C₁-C₆-alkoxy)C₁-C₆-alkyl, C₁-C₆-alkylcarbonyl-C₁-C₆-alkyl, C₁-C₆-alkoxycarbonyl-C₁-C₆-alkyl or C₃-C₆-cycloalkyl-C₁-C₆-alkyl;
   [0486] R⁹ is C₁-C₆-alkyl;
[0487] n is 1;
[0488] Q is O, S, SO, SO₂, NH or (C₁-C₃-alkyl)N;
[0489] W is O;
[0490] X is O;
[0491] Y is O;
[0492] Z is selected from the group consisting of Z¹, Z², Z⁴, Z⁵, Z⁶, Z⁷, Z⁸, Z⁹, Z¹⁰, Z¹¹ and Z²¹ as defined above, wherein R^{a}, R^{b}, R^{c}, R^{d} and R^{e} independently of one another are H, halogen, CN, C₁-C₆-alkyl, C₁-C₆-haloalkyl, C₁-C₆-alkoxy, C₁-C₆-haloalkoxy;
[0493] especially preferred are the phenyluracils of formula (I) wherein
[0494] R¹ is NH₂ or CH₃;
[0495] R² is C₁-C₄-haloalkyl;
[0496] R³ is H;
[0497] R⁴ is H, F or Cl;
[0498] R⁵ is C₁-C₃-alkoxy;
[0499] R⁶ is H;
[0500] R⁷ is OR⁸ or NR⁸S(O)₂R⁹, wherein
   [0501] R⁸ is hydrogen, C₁-C₆-alkyl, C₃-C₆-alkenyl, C₃-C₆-alkynyl or C₁-C₆-alkoxy-C₁-C₆-alkyl, and
   [0502] R⁹ is C₁-C₆-alkyl;
[0503] n is 1;
[0504] Q is O or S;
[0505] W is O;
[0506] X is O;
[0507] Y is O;
[0508] Z is selected from the group consisting of Z¹, Z⁴, Z⁵, Z⁶, Z⁷ and Z²¹ as defined above, wherein R^{a}, R^{b}, R^{c}, R^{d} and R^{e} independently of one another are H, halogen, CN, C₁-C₆-alkyl, C₁-C₆-haloalkyl, C₁-C₆-alkoxy, C₁-C₆-haloalkoxy;
[0509] also especially preferred are the phenyluracils of formula (I) wherein
[0510] R¹ is NH₂ or CH₃;
[0511] R² is C₁-C₄-haloalkyl;
[0512] R³ is H;
[0513] R⁴ is H, F or Cl;
[0514] R⁵ is C₁-C₃-alkoxy;
[0515] R⁶ is H;
[0516] R⁷ is OR⁸ or NR⁸S(O)₂R⁹, wherein
   [0517] R⁸ is hydrogen, C₁-C₆-alkyl, C₃-C₆-alkenyl, C₃-C₆-alkynyl or C₁-C₆-alkoxy-C₁-C₆-alkyl, and
   [0518] R⁹ is C₁-C₆-alkyl;
[0519] n is 1;
[0520] Q is O or S;
[0521] W is O;
[0522] X is O;
[0523] Y is O;
[0524] Z is selected from the group consisting of Z¹, Z⁴, Z⁵, Z⁶ and Z⁷ as defined above, wherein R^{a}, R^{b}, R^{c}, R^{d} and R^{e} independently of one another are H, halogen, CN, C₁-C₆-alkyl, C₁-C₆-haloalkyl, C₁-C₆-alkoxy, C₁-C₆-haloalkoxy;
[0525] more preferred are the phenyluracils of formula (I) wherein
[0526] R¹ is CH₃;
[0527] R² is CF₃;
[0528] R³ is H;
[0529] R⁴ is H, F or Cl;
[0530] R⁵ is OCH₃;
[0531] R⁶ is H;
[0532] R⁷ is OR⁸ or NR⁸S(O)₂R⁹; wherein
   [0533] R⁸ is hydrogen, C₁-C₆-alkyl or C₃-C₆-alkenyl; and
   [0534] R⁹ is C₁-C₆-alkyl;
[0535] n is 1;
[0536] Q is O;
[0537] W is O;
[0538] X is O;
[0539] Y is O;
[0540] Z is selected from the group consisting of Z¹ and Z⁷ as defined above, wherein R^{a}, R^{b}, R^{c}, R^{d} and R^{e} independently of one another are H, halogen, CN, C₁-C₆-alkyl, C₁-C₆-haloalkyl, C₁-C₆-alkoxy, C₁-C₆-haloalkoxy.

[0541] Also preferred are the phenyluracils of formula (I) wherein
[0542] R¹ is CH₃;
[0543] R² is CF₃;
[0544] R³ is H;
[0545] R⁴ is H, F or Cl;
[0546] R⁵ is OCH₃;
[0547] R⁶ is H;
[0548] R⁷ OR⁸, SR⁸, NR⁸OR⁹, NR⁸S(O)₂R⁹ or NR⁸S(O)₂NR⁹R¹⁰, wherein
   [0549] R⁸ is hydrogen, C₁-C₆-alkyl, C₃-C₆-alkenyl, C₃-C₆-alkynyl, C₁-C₆-haloalkyl, C₃-C₆-haloalkenyl, C₃-C₆-haloalkynyl, C₁-C₆-cyanoalkyl, C₁-C₆-alkoxy-C₁-C₆-alkyl, C₁-C₆-alkoxy-C₁-C₆-alkoxy-C₁-C₆-alkyl, di(C₁-C₆-alkoxy)C₁-C₆-alkyl, C₁-C₆-haloalkoxy-C₁-C₆-alkyl, C₃-C₆-alkenyloxy-C₁-C₆-alkyl, C₃-C₆-haloalkenyloxy-C₁-C₆-alkyl, C₃-C₆-alkenyloxy-C₁-C₆-alkoxy-C₁-C₆-alkyl, C₁-C₆-alkylthio-C₁-C₆-alkyl, C₁-C₆-alkylsulfinyl-C₁-C₆-alkyl, C₁-C₆-alkylsulfonyl-C₁-C₆-alkyl, C₁-C₆-alkylcarbonyl-C₁-C₆-alkyl, C₁-C₆-alkoxycarbonyl-C₁-C₆-alkyl, C₁-C₆-haloalkoxycarbonyl-C₁-C₆-alkyl, C₃-C₆-alkenyloxycarbonyl-C₁-C₆-alkyl, C₃-C₆-alkynyloxycarbonyl-C₁-C₆-alkyl, amino, (C₁-C₆-alkyl)amino, di(C₁-C₆-alkyl)amino, (C₁-C₆-alkylcarbonyl)amino, amino-C₁-C₆-alkyl, (C₁-C₆-alkyl)amino-C₁-C₆-alkyl, di(C₁-C₆-alkyl)amino-C₁-C₆-alkyl, aminocarbonyl-C₁-C₆-alkyl, (C₁-C₆-alkyl)aminocarbonyl-C₁-C₆-alkyl, di(C₁-C₆-alkyl)aminocarbonyl-C₁-C₆-alkyl,
      [0550] —N═CR¹¹R¹², wherein R¹¹ and R¹² independently of one another are H, C₁-C₄-alkyl or phenyl;
      [0551] C₃-C₆-cycloalkyl, C₃-C₆-cycloalkyl-C₁-C₆-alkyl, C₃-C₆-heterocyclyl, C₃-C₆-heterocyclyl-C₁-C₆-alkyl, phenyl, phenyl-C₁-C₄-alkyl or a 5- or 6 membered heteroaryl,
         [0552] wherein each cycloalkyl, heterocyclyl, phenyl or heteroaryl ring can be substituted by one to four substituents selected from R¹³ or a 3- to 7-membered carbocyclus,
         which carbocyclus optionally has in addition to carbon atoms one or two ring members selected from the group consisting of
         —N(R¹¹)—, —N═N—, —C(═O)—, —O— and —S—, and which carbocyclus is optionally substituted with one to four substituents selected from R¹³;
         wherein R¹³ is halogen, NO₂, CN, C₁-C₄-alkyl, C₁-C₄-haloalkyl, C₁-C₄-alkoxy or C₁-C₄-alkoxycarbonyl;
   [0553] R⁹, R¹⁰ independently of one another are R⁸, or together form a 3- to 7-membered carbocyclus,
      [0554] which carbocyclus optionally has in addition to carbon atoms one or two ring members selected from the group consisting of —N(R¹¹)—, —N═N—, —C(═O)—, —O— and —S—, and
      [0555] which carbocyclus is optionally substituted with one to four substituents selected from R¹³;
[0556] n is 1;
[0557] Q is O;
[0558] W is O;
[0559] X is O;
[0560] Y is O;
[0561] Z is selected from the group consisting of Z¹ and Z⁷ as defined above, wherein R^{a}, R^{b}, R^{c}, R^{d} and R^{e} independently of one another are H, halogen, CN, C₁-C₆-alkyl, C₁-C₆-haloalkyl, C₁-C₆-alkoxy, C₁-C₆-haloalkoxy.

[0562] Particular preference is given to phenyluracils of formula (I.a) (corresponds to formula (I) wherein R¹ is CH₃, R² is CF₃, R³ is H, R⁶ is H, n is 1, Q, W, X and Y are O, and Z is Z-1 as defined, wherein R^{a}, R^{b}, R^{c} and R^{d} are H:

[chemical structure]

[0563] wherein the variables R⁴, R⁵, and R⁷ have the meanings, in particular the preferred meanings, as defined above;

[0564] Special preference is given to the phenyluracils of formulae (I.a.1) to (I.a.56) of Table A, where the definitions of the variables R⁴, R⁵, and R⁷ are of particular importance for the compounds according to the invention not only in combination with one another but in each case also on their own:

TABLE A

| No. | R⁴ | R⁵ | R⁷ |
|---|---|---|---|
| I.a.1. | H | OCH₃ | OH |
| I.a.2. | H | OCH₃ | OCH₃ |
| I.a.3. | H | OCH₃ | OC₂H₅ |
| I.a.4. | H | OCH₃ | OCH(CH₃)₂ |
| I.a.5. | H | OCH₃ | OCH₂CH₂CH₃ |
| I.a.6. | H | OCH₃ | OCH₂CH(CH₃)₂ |
| I.a.7. | H | OCH₃ | OCH₂CH═CH₂ |
| I.a.8. | H | OCH₃ | OCH₂C≡CH |
| I.a.9. | H | OCH₃ | OCH₂CF₃ |
| I.a.10. | H | OCH₃ | OCH₂CHF₂ |
| I.a.11. | H | OCH₃ | OC₆H₅ |
| I.a.12. | H | OCH₃ | OCH₂(C₆H₅) |
| I.a.13. | H | OCH₃ | OCH₂OCH₃ |
| I.a.14. | H | OCH₃ | OCH₂OCH₂CH₃ |
| I.a.15. | H | OCH₃ | OCH₂CH₂OCH₃ |
| I.a.16. | H | OCH₃ | OCH₂CH₂OCH₂CH₃ |
| I.a.17. | H | OCH₃ | OCH₂(CO)OCH₃ |
| I.a.18. | H | OCH₃ | OCH₂(CO)OCH₂CH₃ |
| I.a.19. | H | OCH₃ | OCH(CH₃)(CO)OCH₃ |
| I.a.20. | H | OCH₃ | OCH(CH₃)(CO)OCH₂CH₃ |
| I.a.21. | H | OCH₃ | OCH₂-cyclopropyl |
| I.a.22. | H | OCH₃ | OCH₂-cyclobutyl |
| I.a.23. | H | OCH₃ | SCH₃ |
| I.a.24. | H | OCH₃ | SC₂H₅ |
| I.a.25. | H | OCH₃ | NHSO₂CH₃ |
| I.a.26. | H | OCH₃ | NHSO₂CH(CH₃)₂ |
| I.a.27. | H | OCH₃ | NHSO₂N(CH₃)₂ |
| I.a.28. | H | OCH₃ | NHSO₂N(CH₃)[CH(CH₃)₂] |
| I.a.29. | F | OCH₃ | OH |
| I.a.30. | F | OCH₃ | OCH₃ |
| I.a.31. | F | OCH₃ | OC₂H₅ |
| I.a.32. | F | OCH₃ | OCH(CH₃)₂ |
| I.a.33. | F | OCH₃ | OCH₂CH₂CH₃ |
| I.a.34. | F | OCH₃ | OCH₂CH(CH₃)₂ |
| I.a.35. | F | OCH₃ | OCH₂CH═CH₂ |
| I.a.36. | F | OCH₃ | OCH₂C≡CH |
| I.a.37. | F | OCH₃ | OCH₂CF₃ |
| I.a.38. | F | OCH₃ | OCH₂CHF₂ |
| I.a.39. | F | OCH₃ | OC₆H₅ |
| I.a.40. | F | OCH₃ | OCH₂(C₆H₅) |
| I.a.41. | F | OCH₃ | OCH₂OCH₃ |
| I.a.42. | F | OCH₃ | OCH₂OCH₂CH₃ |
| I.a.43. | F | OCH₃ | OCH₂CH₂OCH₃ |
| I.a.44. | F | OCH₃ | OCH₂CH₂OCH₂CH₃ |
| I.a.45. | F | OCH₃ | OCH₂(CO)OCH₃ |
| I.a.46. | F | OCH₃ | OCH₂(CO)OCH₂CH₃ |
| I.a.47. | F | OCH₃ | OCH(CH₃)(CO)OCH₃ |
| I.a.48. | F | OCH₃ | OCH(CH₃)(CO)OCH₂CH₃ |
| I.a.49. | F | OCH₃ | OCH₂-cyclopropyl |
| I.a.50. | F | OCH₃ | OCH₂-cyclobutyl |
| I.a.51. | F | OCH₃ | SCH₃ |
| I.a.52. | F | OCH₃ | SC₂H₅ |
| I.a.53. | F | OCH₃ | NHSO₂CH₃ |
| I.a.54. | F | OCH₃ | NHSO₂CH(CH₃)₂ |
| I.a.55. | F | OCH₃ | NHSO₂N(CH₃)₂ |
| I.a.56. | F | OCH₃ | NHSO₂N(CH₃)[CH(CH₃)₂] |

[0565] Also preferred are the phenyluracils of formula (I.b), preferably the phenyluracils of formulae (I.b.1) to (I.b.56), more preferably phenyluracils (I.b.1) to (I.b.54), which differ from the corresponding phenyluracils of formulae (I.a.1) to (I.a.56), preferably phenyluracils of formulae (I.a.1) to (I.a.54), only in that Q is S:

[chemical structure]

[0566] Also preferred are the phenyluracils of formula (I.c), preferably the phenyluracils of formulae (I.c.1) to (I.c.56), more preferably phenyluracils (I.c.1) to (I.c.54), which differ from the corresponding phenyluracils of formulae (I.a.1) to (I.a.56), preferably phenyluracils of formulae (I.a.1) to (I.a.54), only in that Z is Z-2, wherein R^{a}, R^{b}, R^{c} and R^{e} are H:

[chemical structure]

[0567] Also preferred are the phenyluracils of formula (I.d), preferably the phenyluracils of formulae (I.d.1) to (I.d.56), more preferably phenyluracils (I.d.1) to (I.d.54), which differ from the corresponding phenyluracils of formulae (I.a.1) to (I.a.56), preferably phenyluracils of formulae (I.a.1) to (I.a.54), only in that Z is Z-3, wherein R^{a}, R^{b}, R^{d} and R^{e} are H:

[chemical structure]

[0568] Also preferred are the phenyluracils of formula (I.e), preferably the phenyluracils of formulae (I.e.1) to (I.e.56), more preferably phenyluracils (I.e.1) to (I.e.54), which differ from the corresponding phenyluracils of formulae (I.a.1) to (I.a.56), preferably phenyluracils of formulae (I.a.1) to (I.a.54), only in that Z is Z-4, wherein R^{b}, R^{c} and R^{d} are H:

[chemical structure]

[0569] Also preferred are the phenyluracils of formula (I.f), preferably the phenyluracils of formulae (I.f.1) to (I.f.56), more preferably phenyluracils (I.f.1) to (I.f.54), which differ from the corresponding phenyluracils of formulae (I.a.1) to (I.a.56), preferably phenyluracils of formulae (I.a.1) to (I.a.54), only in that Z is Z-5, wherein R^{a}, R^{c} and R^{d} are H:

[chemical structure]

[0570] Also preferred are the phenyluracils of formula (I.g), preferably the phenyluracils of formulae (I.g.1) to (I.g.56), more preferably phenyluracils (I.g.1) to (I.g.54), which differ from the corresponding phenyluracils of formulae (I.a.1) to (I.a.56), preferably phenyluracils of formulae (I.a.1) to (I.a.54), only in that Z is Z-6, wherein R^{a}, R^{b} and R^{d} are H:

[chemical structure]

[0571] Also preferred are the phenyluracils of formula (I.h), preferably the phenyluracils of formulae (I.h.1) to (I.h.56), more preferably phenyluracils (I.h.1) to (I.h.54), which differ from the corresponding phenyluracils of formulae (I.a.1) to (I.a.56), preferably phenyluracils of formulae (I.a.1) to (I.a.54), only in that Z is Z-7, wherein R^{a}, R^{b} and R^{d} are H:

[chemical structure]

[0572] Also preferred are the phenyluracils of formula (I.i), preferably the phenyluracils of formulae (I.i.1) to (I.i.56), more preferably phenyluracils (I.i.1) to (I.i.54), which differ from the corresponding phenyluracils of formulae (I.a.1) to (I.a.56), preferably phenyluracils of formulae (I.a.1) to (I.a.54), only in that Z is Z-7, wherein R^{a}, R^{b} and R^{d} are H, and Q is S:

[chemical structure]

[0573] Also preferred are the phenyluracils of formula (I.k), preferably the phenyluracils of formulae (I.k.1) to (I.k.56), more preferably phenyluracils (I.k.1) to (I.k.54), which differ from the corresponding phenyluracils of formulae (I.a.1) to (I.a.56), preferably phenyluracils of formulae (I.a.1) to (I.a.54), only in that Z is Z-8, wherein R^{b}, R^{c} and R^{e} are H:

[chemical structure]

[0574] Also preferred are the phenyluracils of formula (I.m), preferably the phenyluracils of formulae (I.m.1) to (I.m.56), more preferably phenyluracils (I.m.1) to (I.m.54), which differ from the corresponding phenyluracils of formulae (I.a.1) to (I.a.56), preferably phenyluracils of formulae

[chemical structure]

(I.a.1) to (I.a.54), only in that Z is Z-10, wherein R^{a}, R^{b} and R^{e} are H:

[chemical structure]

[0575] Also preferred are the phenyluracils of formula (I.n), preferably the phenyluracils of formulae (I.n.1) to (I.n.56), more preferably phenyluracils (I.n.1) to (I.n.54), which differ from the corresponding phenyluracils of formulae (I.a.1) to (I.a.56), preferably phenyluracils of formulae (I.a.1) to (I.a.54), only in that Z is Z-11, wherein R^{a}, R^{b} and R^{c} are H:

[chemical structure]

[0576] Also preferred are the phenyluracils of formula (I.o), preferably the phenyluracils of formulae (I.o.1) to (I.o.56), more preferably phenyluracils (I.o.1) to (I.o.54), which differ from the corresponding phenyluracils of formulae (I.a.1) to (I.a.56), preferably phenyluracils of formulae (I.a.1) to (I.a.54), only in that Z is Z-12, wherein R^{b}, R^{d} and R^{e} are H:

[chemical structure]

[0577] Also preferred are the phenyluracils of formula (I.p), preferably the phenyluracils of formulae (I.p.1) to (I.p.56), more preferably phenyluracils (I.p.1) to (I.p.54), which differ from the corresponding phenyluracils of formulae (I.a.1) to (I.a.56), preferably phenyluracils of formulae (I.a.1) to (I.a.54), only in that Z is Z-13, wherein R^{a}, R^{d} and R^{e} are H:

[chemical structure]

[0578] Also preferred are the phenyluracils of formula (I.q), preferably the phenyluracils of formulae (I.q.1) to (I.q.56), more preferably phenyluracils (I.q.1) to (I.q.54), which differ from the corresponding phenyluracils of formulae (I.a.1) to (I.a.56), preferably phenyluracils of formulae (I.a.1) to (I.a.54), only in that Z is Z-21, wherein R^{a} and R^{c} are H:

[chemical structure]

[0579] Also preferred are the phenyluracils of formula (I.r) [correspond to formula (I.a), wherein R⁷ is N(CH₃)OCH₃; i.e. correspond to formula (I) wherein R¹ is CH₃, R² is CF₃, R³ is H, R⁶ is H, R⁷ is N(CH₃)OCH₃, n is 1, Q, W, X and Y are O, and Z is Z-1 as defined, wherein R^{a}, R^{b}, R^{c} and R^{d} are H], wherein the variables R⁴ and R⁵, have the meanings, in particular the preferred meanings, as defined above;
[0580] preferably the phenyluracils of formulae (I.r.1) and (I.r.29), which differ from the corresponding phenyluracils of formulae (I.a.1) and (I.a.29) only that R⁷ is N(CH₃)OCH₃:

[chemical structure]

[0581] Also preferred are the phenyluracils of formula (I.s) [correspond to formula (I.a), wherein R⁵ is SCH₃; i.e. correspond to formula (I) wherein R¹ is CH₃, R² is CF₃, R³ is H, R⁵ is SCH₃, R⁶ is H, n is 1, Q, W, X and Y are O, and Z is Z-1 as defined, wherein R^{a}, R^{b}, R^{c} and R^{d} are H], wherein the variables R⁴ and R⁷, have the meanings, in particular the preferred meanings, as defined above;
[0582] preferably the phenyluracils of formulae (I.s.1) to (I.s.56), which differ from the corresponding phenyluracils of formulae (I.a.1) to (I.a.56) only that R⁵ is SCH₃:

[chemical structure]

[0583] Also preferred are the phenyluracils of formula (I.t) [correspond to formula (I.a), wherein R⁵ is F; i.e. correspond to formula (I) wherein R¹ is CH₃, R² is CF₃, R³ is H, R⁵ is F, R⁶ is H, n is 1, Q, W, X and Y are O, and Z is Z-1 as defined, wherein R^{a}, R^{b}, R^{c} and R^{d} are H], wherein the variables R⁴ and R⁷, have the meanings, in particular the preferred meanings, as defined above;
[0584] preferably the phenyluracils of formulae (I.t1) to (I.t.56), which differ from the corresponding phenyluracils of formulae (I.a.1) to (I.a.56) only that R⁵ is F:

[chemical structure]

[0585] Also preferred are the phenyluracils of formula (I.u), preferably the phenyluracils of formulae (I.u.1) to (I.u.56), which differ from the corresponding phenyluracils of formulae (I.a.1) to (I.a.56) only in that R₃ is CH₃:

[chemical structure]

[0586] Also preferred are the phenyluracils of formulae (La), (I.h), (I.r), (I.s), (I.t) and (I.u); particularly preferred the phenyluracils of formula (I.a).

[0587] Also preferred are the phenyluracils of formulae (I.a.1) to (I.a.56), (I.h.1) to (I.h.56), (I.r.1), (I.r.29), (I.s.1) to (I.s.56), (I.t.1) to (I.t.56) and (I.u.1) to (I.u.56);
[0588] particularly preferred the phenyluracils of formula (I.a.1) to (I.a.56).

[0589] Also preferred are the phenyluracils of formulae (I.a.29), (I.a.30), (I.a.31), (I.a.35), (I.a.36), (I.a.43), (I.a.53), (I.h.30), (I.r.29), (I.s.30), (I.t.31) and (I.u.30);
[0590] particularly preferred the phenyluracils of formulae (I.a.29), (I.a.30), (I.a.31), (I.a.35), (I.a.36), (I.a.43), (I.a.53);
[0591] also particularly preferred the phenyluracils of formulae (I.a.30), (I.h.30), (I.s.30) and (I.u.30).

[0592] Especially preferred phenyluracils are
[0593] methyl rac-2-[2-[2-bromo-4-fluoro-5-[3-methyl-2,6-dioxo-4-(trifluoromethyl)pyrimidin-1-yl]phenoxy]phenoxy]-2-methoxy-acetate;
[0594] methyl (2S)-2-[2-[2-bromo-4-fluoro-5-[3-methyl-2,6-dioxo-4-(trifluoromethyl)pyrimidin-1-yl]phenoxy]phenoxy]-2-methoxy-acetate;
[0595] methyl (2R)-2-[2-[2-bromo-4-fluoro-5-[3-methyl-2,6-dioxo-4-(trifluoromethyl)pyrimidin-1-yl]phenoxy]phenoxy]-2-methoxy-acetate;
[0596] rac-2-[2-[2-bromo-4-fluoro-5-[3-methyl-2,6-dioxo-4-(trifluoromethyl)pyrimidin-1-yl]phenoxy]phenoxy]-2-methoxy-acetic acid;
[0597] (2S)-2-[2-[2-bromo-4-fluoro-5-[3-methyl-2,6-dioxo-4-(trifluoromethyl) pyrimidin-1-yl]phenoxy]phenoxy]-2-methoxy-acetic acid;
[0598] (2R)-2-[2-[2-bromo-4-fluoro-5-[3-methyl-2,6-dioxo-4-(trifluoromethyl)pyrimidin-1-yl]phenoxy]phenoxy]-2-methoxy-acetic acid;
[0599] ethyl rac-2-[2-[2-bromo-4-fluoro-5-[3-methyl-2,6-dioxo-4-(trifluoromethyl)pyrimidin-1-yl]phenoxy]phenoxy]-2-methoxy-acetate;
[0600] ethyl (2S)-2-[2-[2-bromo-4-fluoro-5-[3-methyl-2,6-dioxo-4-(trifluoromethyl)pyrimidin-1-yl]phenoxy]phenoxy]-2-methoxy-acetate;
[0601] ethyl (2R)-2-[2-[2-bromo-4-fluoro-5-[3-methyl-2,6-dioxo-4-(trifluoromethyl)pyrimidin-1-yl]phenoxy]phenoxy]-2-methoxy-acetate;
[0602] allyl rac-2-[2-[2-bromo-4-fluoro-5-[3-methyl-2,6-dioxo-4-(trifluoromethyl)pyrimidin-1-yl]phenoxy]phenoxy]-2-methoxy-acetate;
[0603] allyl (2S)-2-[2-[2-bromo-4-fluoro-5-[3-methyl-2,6-dioxo-4-(trifluoromethyl)pyrimidin-1-yl]phenoxy]phenoxy]-2-methoxy-acetate;
[0604] allyl (2R)-2-[2-[2-bromo-4-fluoro-5-[3-methyl-2,6-dioxo-4-(trifluoromethyl)pyrimidin-1-yl]phenoxy]phenoxy]-2-methoxy-acetate;
[0605] prop-2-ynyl rac-2-[2-[2-bromo-4-fluoro-5-[3-methyl-2,6-dioxo-4-(trifluoromethyl)pyrimidin-1-yl]phenoxy]phenoxy]-2-methoxy-acetate;
[0606] prop-2-ynyl (2S)-2-[2-[2-bromo-4-fluoro-5-[3-methyl-2,6-dioxo-4-(trifluoromethyl)pyrimidin-1-yl]phenoxy]phenoxy]-2-methoxy-acetate;
[0607] prop-2-ynyl (2R)-2-[2-[2-bromo-4-fluoro-5-[3-methyl-2,6-dioxo-4-(trifluoromethyl)pyrimidin-1-yl]phenoxy]phenoxy]-2-methoxy-acetate;
[0608] 2-methoxyethyl rac-2-[2-[2-bromo-4-fluoro-5-[3-methyl-2,6-dioxo-4-(trifluoromethyl)pyrimidin-1-yl]phenoxy]phenoxy]-2-methoxy-acetate;
[0609] 2-methoxyethyl (2S)-2-[2-[2-bromo-4-fluoro-5-[3-methyl-2,6-dioxo-4-(trifluoromethyl)pyrimidin-1-yl]phenoxy]phenoxy]-2-methoxy-acetate;
[0610] 2-methoxyethyl (2R)-2-[2-[2-bromo-4-fluoro-5-[3-methyl-2,6-dioxo-4-(trifluoromethyl)pyrimidin-1-yl]phenoxy]phenoxy]-2-methoxy-acetate;
[0611] rac-2-[2-[2-bromo-4-fluoro-5-[3-methyl-2,6-dioxo-4-(trifluoromethyl)pyrimidin-1-yl]phenoxy]phenoxy]-N,2-dimethoxy-N-methyl-acetamide;
[0612] (2S)-2-[2-[2-bromo-4-fluoro-5-[3-methyl-2,6-dioxo-4-(trifluoromethyl) pyrimidin-1-yl]phenoxy]phenoxy]-N,2-dimethoxy-N-methyl-acetamide;
[0613] (2R)-2-[2-[2-bromo-4-fluoro-5-[3-methyl-2,6-dioxo-4-(trifluoromethyl)pyrimidin-1-yl]phenoxy]phenoxy]-N,2-dimethoxy-N-methyl-acetamide;
[0614] rac-2-[2-[2-bromo-4-fluoro-5-[3-methyl-2,6-dioxo-4-(trifluoromethyl)pyrimidin-1-yl]phenoxy]phenoxy]-2-methoxy-N-methylsulfonyl-acetamide;
[0615] (2S)-2-[2-[2-bromo-4-fluoro-5-[3-methyl-2,6-dioxo-4-(trifluoromethyl) pyrimidin-1-yl]phenoxy]phenoxy]-2-methoxy-N-methylsulfonyl-acetamide;
[0616] (2R)-2-[2-[2-bromo-4-fluoro-5-[3-methyl-2,6-dioxo-4-(trifluoromethyl)pyrimidin-1-yl]phenoxy]phenoxy]-2-methoxy-N-methylsulfonyl-acetamide;
[0617] methyl rac-2-[2-[2-bromo-4-fluoro-5-[3-methyl-2,6-dioxo-4-(trifluoromethyl)pyrimidin-1-yl]phenoxy]phenoxy]-2-methylsulfanyl-acetate;
[0618] methyl (2S)-2-[2-[2-bromo-4-fluoro-5-[3-methyl-2,6-dioxo-4-(trifluoromethyl)pyrimidin-1-yl]phenoxy]phenoxy]-2-methylsulfanyl-acetate;
[0619] methyl (2R)-2-[2-[2-bromo-4-fluoro-5-[3-methyl-2,6-dioxo-4-(trifluoromethyl)pyrimidin-1-yl]phenoxy]phenoxy]-2-methylsulfanyl-acetate;
[0620] ethyl rac-2-[2-[2-bromo-4-fluoro-5-[3-methyl-2,6-dioxo-4-(trifluoromethyl)pyrimidin-1-yl]phenoxy]phenoxy]-2-fluoro-acetate;
[0621] ethyl (2S)-2-[2-[2-bromo-4-fluoro-5-[3-methyl-2,6-dioxo-4-(trifluoromethyl)pyrimidin-1-yl]phenoxy]phenoxy]-2-fluoro-acetate;
[0622] ethyl (2R)-2-[2-[2-bromo-4-fluoro-5-[3-methyl-2,6-dioxo-4-(trifluoromethyl)pyrimidin-1-yl]phenoxy]phenoxy]-2-fluoro-acetate;
[0623] methyl rac-2-[2-[2-bromo-5-[3,5-dimethyl-2,6-dioxo-4-(trifluoromethyl)pyrimidin-1-yl]-4-fluoro-phenoxy]phenoxy]-2-methoxy-acetate;
[0624] methyl (2S)-2-[2-[2-bromo-5-[3,5-dimethyl-2,6-dioxo-4-(trifluoromethyl)pyrimidin-1-yl]-4-fluoro-phenoxy]phenoxy]-2-methoxy-acetate;
[0625] methyl (2R)-2-[2-[2-bromo-5-[3,5-dimethyl-2,6-dioxo-4-(trifluoromethyl)pyrimidin-1-yl]-4-fluoro-phenoxy]phenoxy]-2-methoxy-acetate;
[0626] methyl rac-2-[[3-[2-bromo-4-fluoro-5-[3-methyl-2,6-dioxo-4-(trifluoromethyl)pyrimidin-1-yl]phenoxy]-2-pyridyl]oxy]-2-methoxy-acetate;
[0627] methyl (2S)-2-[[3-[2-bromo-4-fluoro-5-[3-methyl-2,6-dioxo-4-(trifluoromethyl)pyrimidin-1-yl]phenoxy]-2-pyridyl]oxy]-2-methoxy-acetate;
[0628] methyl (2R)-2-[[3-[2-bromo-4-fluoro-5-[3-methyl-2,6-dioxo-4-(trifluoromethyl)pyrimidin-1-yl]phenoxy]-2-pyridyl]oxy]-2-methoxy-acetate.

[0629] To widen the spectrum of action and to achieve synergistic effects, the phenyluracils of formula (I) may be mixed with a large number of representatives of other herbicidal or growth-regulating active ingredient groups and then applied concomitantly. Suitable components for mixtures are, for example, herbicides from the classes of the acetamides, amides, aryloxyphenoxypropionates, benzamides, benzofuran, benzoic acids, benzothiadiazinones, bipyridylium, carbamates, chloroacetamides, chlorocarboxylic acids, cyclohexanediones, dinitroanilines, dinitrophenol, diphenyl ether, glycines, imidazolinones, isoxazoles, isoxazolidinones, nitriles, N-phenylphthalimides, oxadiazoles, oxazolidinediones, oxyacetamides, phenoxycarboxylic acids, phenylcarbamates, phenylpyrazoles, phenylpyrazolines, phenylpyridazines, phosphinic acids, phosphoroamidates, phosphorodithioates, phthalamates, pyrazoles, pyridazinones, pyridines, pyridinecarboxylic acids, pyridinecarboxamides, pyrimidinediones, pyrimidinyl(thio)benzoates, quinolinecarboxylic acids, semicarbazones, sulfonylaminocarbonyltriazolinones, sulfonylureas, tetrazolinones, thiadiazoles, thiocarbamates, triazines, triazinones, triazoles, triazolinones, triazolocarboxamides, triazolopyrimidines, triketones, uracils, ureas.

[0630] It may furthermore be beneficial to apply the phenyluracils of formula (I) alone or in combination with other herbicides, or else in the form of a mixture with other crop protection agents, for example together with agents for controlling pests or phytopathogenic fungi or bacteria. Also of interest is the miscibility with mineral salt solutions, which are employed for treating nutritional and trace element deficiencies. Other additives such as non-phytotoxic oils and oil concentrates may also be added.

[0631] In one embodiment of the present invention the compositions according to the present invention comprise at least one phenyluracil of formula (I) (compound A) and at least one further active compound selected from herbicides B, preferably herbicides B of class b1) to b15), and safeners C (compound C).

[0632] In another embodiment of the present invention the compositions according to the present invention comprise at least one phenyluracil of formula (I) and at least one further active compound B (herbicide B).

[0633] The further herbicidal compound B (component B) is preferably selected from the herbicides of class b1) to b15):
[0634] B) herbicides of class b1) to b15):
   [0635] b1) lipid biosynthesis inhibitors;
   [0636] b2) acetolactate synthase inhibitors (ALS inhibitors);
   [0637] b3) photosynthesis inhibitors;
   [0638] b4) protoporphyrinogen-IX oxidase inhibitors,
   [0639] b5) bleacher herbicides;
   [0640] b6) enolpyruvyl shikimate 3-phosphate synthase inhibitors (EPSP inhibitors);
   [0641] b7) glutamine synthetase inhibitors;
   [0642] b8) 7,8-dihydropteroate synthase inhibitors (DHP inhibitors);
   [0643] b9) mitosis inhibitors;
   [0644] b10) inhibitors of the synthesis of very long chain fatty acids (VLCFA inhibitors);
   [0645] b11) cellulose biosynthesis inhibitors;
   [0646] b12) decoupler herbicides;
   [0647] b13) auxinic herbicides;
   [0648] b14) auxin transport inhibitors; and
   [0649] b15) other herbicides selected from the group consisting of bromobutide, chlorflurenol, chlorflurenol-methyl, cinmethylin, cumyluron, dalapon, dazomet, difenzoquat, difenzoquat-metilsulfate, dimethipin, DSMA, dymron, endothal and its salts, etobenzanid, flamprop, flamprop-isopropyl, flamprop-methyl, flamprop-M-isopropyl, flamprop-M-methyl, flurenol, flurenol-butyl, flurprimidol, fosamine, fosamine-ammonium, indanofan, indaziflam, maleic hydrazide, mefluidide, metam, methiozolin, methyl azide, methyl bromide, methyl-dymron, methyl iodide, MSMA, oleic acid, oxaziclomefone, pelargonic acid, pyributicarb, quinoclamine, tetflupyrolimet, triaziflam, tridiphane, 6-chloro-3-(2-cyclopropyl-6-methylphenoxy)-4-pyridazinol (CAS 499223-49-3) and its salts and esters, 6-chloro-4-(2,7-dimethyl-1-naphthyl)-5-hydroxy-2-methyl-pyridazin-3-one (CAS 2414510-21-5);
[0650] including their agriculturally acceptable salts or derivatives;
[0651] Examples of herbicides B which can be used in combination with the phenyluracils of formula (I) according to the present invention are:
[0652] b1) from the group of the lipid biosynthesis inhibitors:
[0653] ACC-herbicides such as alloxydim, alloxydim-sodium, butroxydim, clethodim, clodinafop, clodinafop-propargyl, cycloxydim, cyhalofop, cyhalofop-butyl, diclofop, diclofop-methyl, fenoxaprop, fenoxaprop-ethyl, fenoxaprop-P, fenoxaprop-P-ethyl, fluazifop, fluazifop-butyl, fluazifop-P, fluazifop-P-butyl, haloxyfop, haloxyfop-methyl, haloxyfop-P, haloxyfop-P-methyl, metamifop, pinoxaden, profoxydim, propaquizafop, quizalofop, quizalofop-ethyl, quizalofop-tefuryl, quizalofop-P, quizalofop-P-ethyl, quizalofop-P-tefuryl, sethoxydim, tepraloxydim, tralkoxydim, 4-(4′-Chloro-4-cyclopropyl-2′-fluoro[1,1′-biphenyl]-3-yl)-5-hydroxy-2,2,6,6-tetramethyl-2H-pyran-3(6H)-one (CAS 1312337-72-6); 4-(2′,4′-Dichloro-4-cyclopropyl[1,1′-biphenyl]-3-yl)-5-hydroxy-2,2,6,6-tetramethyl-2H-pyran-3(6H)-one (CAS 1312337-45-3); 4-(4′-Chloro-4-ethyl-2′-fluoro[1,1′-biphenyl]-3-yl)-5-hydroxy-2,2,6,6-tetramethyl-2H-pyran-3(6H)-one (CAS 1033757-93-5); 4-(2′,4′-Dichloro-4-ethyl[1,1′-biphenyl]-3-yl)-2,2,6,6-tetramethyl-2H-pyran-3,5(4H,6H)-dione (CAS 1312340-84-3); 5-(Acetyloxy)-4-(4′-chloro-4-cyclopropyl-2′-fluoro[1,1′-biphenyl]-3-yl)-3,6-dihydro-2,2,6,6-tetramethyl-2H-pyran-3-one (CAS 1312337-48-6); 5-(Acetyloxy)-4-(2′,4′-dichloro-4-cyclopropyl-[1,1′-biphenyl]-3-yl)-3,6-dihydro-2,2,6,6-tetramethyl-2H-pyran-3-one; 5-(Acetyloxy)-4-(4′-chloro-4-ethyl-2′-fluoro[1,1′-biphenyl]-3-yl)-3,6-dihydro-2,2,6,6-tetramethyl-2H-pyran-3-one (CAS 1312340-82-1); 5-(Acetyloxy)-4-(2′,4′-dichloro-4-ethyl[1,1′-biphenyl]-3-yl)-3,6-dihydro-2,2,6,6-tetramethyl-2H-pyran-3-one (CAS 1033760-55-2); 4-(4′-Chloro-4-cyclopropyl-2′-fluoro[1,1′-biphenyl]-3-yl)-5,6-dihydro-2,2,6,6-tetramethyl-5-oxo-2H-pyran-3-yl carbonic acid methyl ester (CAS 1312337-51-1); 4-(2′,4′-Dichloro-4-cyclopropyl-[1,1′-biphenyl]-3-yl)-5,6-dihydro-2,2,6,6-tetramethyl-5-oxo-2H-pyran-3-yl carbonic acid methyl ester; 4-(4′-Chloro-4-ethyl-2′-fluoro[1,1′-biphenyl]-3-yl)-5,6-dihydro-2,2,6,6-tetramethyl-5-oxo-2H-pyran-3-yl carbonic acid methyl ester (CAS 1312340-83-2); 4-(2′,4′-Dichloro-4-ethyl[1,1′-biphenyl]-3-yl)-5,6-dihydro-2,2,6,6-tetramethyl-5-oxo-2H-pyran-3-yl carbonic acid methyl ester (CAS 1033760-58-5); and non ACC herbicides such as benfuresate, butylate, cycloate, dalapon, dimepiperate, EPTC, esprocarb, ethofumesate, flupropanate, molinate, orbencarb, pebulate, prosulfocarb, TCA, thiobencarb, tiocarbazil, triallate and vernolate;
[0654] b2) from the group of the ALS inhibitors:
[0655] sulfonylureas such as amidosulfuron, azimsulfuron, bensulfuron, bensulfuron-methyl, chlorimuron, chlorimuron-ethyl, chlorsulfuron, cinosulfuron, cyclosulfamuron, ethametsulfuron, ethametsulfuron-methyl, ethoxysulfuron, flazasulfuron, flucetosulfuron, flupyrsulfuron, flupyrsulfuron-methyl-sodium, foramsulfuron, halosulfuron, halosulfuron-methyl, imazosulfuron, iodosulfuron, iodosulfuron-methyl-sodium, iofensulfuron, iofensulfuron-sodium, mesosulfuron, metazosulfuron, metsulfuron, metsulfuron-methyl, nicosulfuron, orthosulfamuron, oxasulfuron, primisulfuron, primisulfuron-methyl, propyrisulfuron, prosulfuron, pyrazosulfuron, pyrazosulfuron-ethyl, rimsulfuron, sulfometuron, sulfometuron-methyl, sulfosulfuron, thifensulfuron, thifensulfuron-methyl, triasulfuron, tribenuron, tribenuron-methyl, trifloxysulfuron, triflusulfuron, triflusulfuron-methyl and tritosulfuron,
[0656] imidazolinones such as imazamethabenz, imazamethabenz-methyl, imazamox, imazapic, imazapyr, imazaquin and imazethapyr, triazolopyrimidine herbicides and sulfonanilides such as cloransulam, cloransulam-methyl, diclosulam, flumetsulam, florasulam, metosulam, penoxsulam, pyrimisulfan and pyroxsulam,
[0657] pyrimidinylbenzoates such as bispyribac, bispyribac-sodium, pyribenzoxim, pyriftalid, pyriminobac, pyriminobac-methyl, pyrithiobac, pyrithiobac-sodium, 4-[[[2-[(4,6-dimethoxy-2-pyrimidinyl)oxy]phenyl]methyl]amino]-benzoic acid-1-methylethyl ester (CAS 420138-41-6), 4-[[[2-[(4,6-dimethoxy-2-pyrimidinyl)oxy]phenyl]methyl]amino]-benzoic acid propyl ester (CAS 420138-40-5), N-(4-bromophenyl)-2-[(4,6-dimethoxy-2-pyrimidinyl)oxy]benzenemethanamine (CAS 420138-01-8),
[0658] sulfonylaminocarbonyl-triazolinone herbicides such as flucarbazone, flucarbazone-sodium, propoxycarbazone, propoxycarbazone-sodium, thiencarbazone and thiencarbazone-methyl; and triafamone;
[0659] among these, a preferred embodiment of the invention relates to those compositions comprising at least one imidazolinone herbicide;
[0660] b3) from the group of the photosynthesis inhibitors:
[0661] amicarbazone, inhibitors of the photosystem II, e.g. 1-(6-tert-butylpyrimidin-4-yl)-2-hydroxy-4-methoxy-3-methyl-2H-pyrrol-5-one (CAS 1654744-66-7), 1-(5-tert-butylisoxazol-3-yl)-2-hydroxy-4-methoxy-3-methyl-2H-pyrrol-5-one (CAS 1637455-12-9), 1-(5-tert-butylisoxazol-3-yl)-4-chloro-2-hydroxy-3-methyl-2H-pyrrol-5-one (CAS 1637453-94-1), 1-(5-tert-butyl-1-methyl-pyrazol-3-yl)-4-chloro-2-hydroxy-3-methyl-2H-pyrrol-5-one (CAS 1654057-29-0), 1-(5-tert-butyl-1-methyl-pyrazol-3-yl)-3-chloro-2-hydroxy-4-methyl-2H-pyrrol-5-one (CAS 1654747-80-4), 4-hydroxy-1-methoxy-5-methyl-3-[4-(trifluoromethyl)-2-pyridyl]imidazolidin-2-one; (CAS 2023785-78-4), 4-hydroxy-1,5-dimethyl-3-[4-(trifluoromethyl)-2-pyridyl]imidazolidin-2-one (CAS 2023785-79-5), 5-ethoxy-4-hydroxy-1-methyl-3-[4-(trifluoromethyl)-2-pyridyl]imidazolidin-2-one (CAS 1701416-69-4), 4-hydroxy-1-methyl-3-[4-(trifluoromethyl)-2-pyridyl]imidazolidin-2-one (CAS 1708087-22-2), 4-hydroxy-1,5-dimethyl-3-[1-methyl-5-(trifluoromethyl)pyrazol-3-yl]imidazolidin-2-one (CAS 2023785-80-8), 1-(5-tert-butylisoxazol-3-yl)-4-ethoxy-5-hydroxy-3-methyl-imidazolidin-2-one (CAS 1844836-64-1), triazine herbicides, including of chlorotriazine, triazinones, triazindiones, methylthiotriazines and pyridazinones such as ametryn, atrazine, chloridazone, cyanazine, desmetryn, dimethametryn, hexazinone, metribuzin, prometon, prometryn, propazine, simazine, simetryn, terbumeton, terbuthylazin, terbutryn and trietazin, aryl urea such as chlorobromuron, chlorotoluron, chloroxuron, dimefuron, diuron, fluometuron, isoproturon, isouron, linuron, metamitron, methabenzthiazuron, metobenzuron, metoxuron, monolinuron, neburon, siduron, tebuthiuron and thiadiazuron, phenyl carbamates such as desmedipham, karbutilat, phenmedipham, phenmedipham-ethyl, nitrile herbicides such as bromofenoxim, bromoxynil and its salts and esters, ioxynil and its salts and esters, uraciles such as bromacil, lenacil and terbacil, and bentazon and bentazon-sodium, pyridate, pyridafol, pentanochlor and propanil and inhibitors of the photosystem I such as diquat, diquat-dibromide, paraquat, paraquat-dichloride and paraquat-dimetilsulfate. Among these, a preferred embodiment of the invention relates to those compositions comprising at least one aryl urea herbicide. Among these, likewise a preferred embodiment of the invention relates to those compositions comprising at least one triazine herbicide. Among these, likewise a preferred embodiment of the invention relates to those compositions comprising at least one nitrile herbicide,
[0662] b4) from the group of the protoporphyrinogen-IX oxidase inhibitors:
[0663] acifluorfen, acifluorfen-sodium, azafenidin, bencarbazone, benzfendizone, bifenox, butafenacil, carfentrazone, carfentrazone-ethyl, chlomethoxyfen, chlorphthalim, cinidon-ethyl, cyclopyranil, fluazolate, flufenpyr, flufenpyr-ethyl, flumiclorac, flumiclorac-pentyl, flumioxazin, fluoroglycofen, fluoroglycofen-ethyl, fluthiacet, fluthiacet-methyl, fomesafen, halosafen, lactofen, oxadiargyl, oxadiazon, oxyfluorfen, pentoxazone, profluazol, pyraclonil, pyraflufen, pyraflufen-ethyl, saflufenacil, sulfentrazone, thidiazimin, tiafenacil, trifludimoxazin, epyrifenacil, N-ethyl-3-(2,6-dichloro-4-trifluoromethylphenoxy)-5-methyl-1H-pyrazole-1-carboxamide (CAS 452098-92-9), N-tetrahydrofurfuryl-3-(2,6-dichloro-4-trifluoromethylphenoxy)-5-methyl-1H-pyrazole-1-carboxamide (CAS 915396-43-9), N-ethyl-3-(2-chloro-6-fluoro-4-trifluoromethylphenoxy)-5-methyl-1H-pyrazole-1-carboxamide (CAS 452099-05-7), N-tetrahydrofurfuryl-3-(2-chloro-6-fluoro-4-trifluoromethylphenoxy)-5-methyl-1H-pyrazole-1-carboxamide (CAS 452100-03-7), 3-[7-fluoro-3-oxo-4-(prop-2-ynyl)-3,4-dihydro-2H-benzo[1,4]oxazin-6-yl]-1,5-dimethyl-6-thioxo-[1,3,5]triazinan-2,4-dione (CAS 451484-50-7), 2-(2,2,7-trifluoro-3-oxo-4-prop-2-ynyl-3,4-dihydro-2H-benzo[1,4]oxazin-6-yl)-4,5,6,7-tetrahydro-isoindole-1,3-dione (CAS 1300118-96-0), 1-methyl-6-trifluoromethyl-3-(2,2,7-trifluoro-3-oxo-4-prop-2-ynyl-3,4-dihydro-2H-benzo[1,4]oxazin-6-yl)-1H-pyrimidine-2,4-dione (CAS 1304113-05-0), methyl (E)-4-[2-chloro-5-[4-chloro-5-(difluoromethoxy)-1H-methyl-pyrazol-3-yl]-4-fluoro-phenoxy]-3-methoxy-but-2-enoate (CAS 948893-00-3), and 3-[7-chloro-5-fluoro-2-(trifluoromethyl)-1H-benzimidazol-4-yl]-1-methyl-6-(trifluoromethyl)-1H-pyrimidine-2,4-dione (CAS 212754-02-4), 2-[2-chloro-5-[3-chloro-5-(trifluoromethyl)-2-pyridinyl]-4-fluorophenoxy]-2-methoxy-acetic acid methyl ester (CAS 1970221-16-9), 2-[2-[[3-chloro-6-[3,6-dihydro-3-methyl-2,6-dioxo-4-(trifluoromethyl)-1(2H)-pyrimidinyl]-5-fluoro-2-pyridinyl]oxy]phenoxy]-acetic acid methyl ester (CAS 2158274-96-3), 2-[2-[[3-chloro-6-[3,6-dihydro-3-methyl-2,6-dioxo-4-(trifluoromethyl)-1(2H)-pyrimidinyl]-5-fluoro-2-pyridinyl]oxy]phenoxy]acetic acid ethyl ester (CAS 158274-50-9), methyl 2-[[3-[2-chloro-5-[4-(difluoromethyl)-3-methyl-5-oxo-1,2,4-triazol-1-yl]-4-fluoro-phenoxy]-2-pyridyl]oxy]acetate (CAS 2271389-22-9), ethyl 2-[[3-[2-chloro-5-[4-(difluoromethyl)-3-methyl-5-oxo-1,2,4-triazol-1-yl]-4-fluoro-phenoxy]-2-pyridyl]oxy]acetate (CAS 2230679-62-4), 2-[[3-[[3-chloro-6-[3,6-dihydro-3-methyl-2,6-dioxo-4-(trifluoromethyl)-1(2H)-pyrimidinyl]-5-fluoro-2-pyridinyl]oxy]-2-pyridinyl]oxy]-acetic acid methyl ester (CAS 2158275-73-9), 2-[[3-[[3-chloro-6-[3,6-dihydro-3-methyl-2,6-dioxo-4-(trifluoromethyl)-1(2H)-pyrimidinyl]-5-fluoro-2-pyridinyl]oxy]-2-pyridinyl]oxy]acetic acid ethyl ester (CAS 2158274-56-5), 2-[2-[[3-chloro-6-[3,6-dihydro-3-methyl-2,6-dioxo-4-(trifluoromethyl)-1(2H)-pyrimidinyl]-5-fluoro-2-pyridinyl]oxy]phenoxy]-N-(methylsulfonyl)-acetamide (CAS 2158274-53-2), 2-[[3-[[3-chloro-6-[3,6-dihydro-3-methyl-2,6-dioxo-4-(trifluoromethyl)-1(2H)-pyrimidinyl]-5-fluoro-2-pyridinyl]oxy]-2-pyridinyl]oxy]-N-(methylsulfonyl)-acetamide (CAS 2158276-22-1), 3-[2-chloro-5-[3,6-dihydro-3-methyl-2,6-dioxo-4-(trifluoromethyl)-1(2H)-pyrimidinyl]-4-fluorophenyl]-4,5-dihydro-5-methyl-5-isoxazolecarboxylic acid ethyl ester (CAS 1949837-17-5);
[0664] b5) from the group of the bleacher herbicides:
[0665] PDS inhibitors: beflubutamid, diflufenican, fluridone, flurochloridone, flurtamone, norflurazon, picolinafen, 4-(3-trifluoromethylphenoxy)-2-(4-trifluoromethylphenyl)pyrimidine (CAS 180608-33-7) and rimisoxafen, HPPD inhibitors: benzobicyclon, benzofenap, bicyclopyrone, clomazone, fenquinotrione, isoxaflutole, mesotrione, oxotrione (CAS 1486617-21-3), pyrasulfotole, pyrazolynate, pyrazoxyfen, sulcotrione, tefuryltrione, tembotrione, tolpyralate, topramezone, bipyrazone, fenpyrazone, cypyrafluone, tripyrasulfone, benquitrione, dioxopyritrione; bleacher, unknown target: aclonifen, amitrole flumeturon 2-chloro-3-methylsulfanyl-N-(1-methyltetrazol-5-yl)-4-(trifluoromethyl)benzamide (CAS 1361139-71-0), bixlozone and 2-(2,5-dichlorophenyl)methyl-4,4-dimethyl-3-isoxazolidinone (CAS 81778-66-7);
[0666] b6) from the group of the EPSP synthase inhibitors:
[0667] glyphosate, glyphosate-isopropylammonium, glyposate-potassium and glyphosate-trimesium (sulfosate);
[0668] b7) from the group of the glutamine synthase inhibitors:
[0669] bilanaphos (bialaphos), bilanaphos-sodium, glufosinate, glufosinate-P and glufosinate-ammonium;
[0670] b8) from the group of the DHP synthase inhibitors:
[0671] asulam;
[0672] b9) from the group of the mitosis inhibitors:
[0673] compounds of group K1: dinitroanilines such as benfluralin, butralin, dinitramine, ethalfluralin, fluchloralin, oryzalin, pendimethalin, prodiamine and trifluralin, phosphoramidates such as amiprophos, amiprophos-methyl, and butamiphos, benzoic acid herbicides such as chlorthal, chlorthal-dimethyl, pyridines such as dithiopyr and thiazopyr, benzamides such as propyzamide and tebutam; compounds of group K2: carbetamide, chlorpropham, flamprop, flamprop-isopropyl, flamprop-methyl, flamprop-M-isopropyl, flamprop-M-methyl and propham; among these, compounds of group K1, in particular dinitroanilines are preferred;
[0674] b10) from the group of the VLCFA inhibitors:
[0675] chloroacetamides such as acetochlor, alachlor, amidochlor, butachlor, dimethachlor, dimethenamid, dimethenamid-P, metazachlor, metolachlor, metolachlor-S, pethoxamid, pretilachlor, propachlor, propisochlor and thenylchlor, oxyacetanilides such as flufenacet and mefenacet, acetanilides such as diphenamid, naproanilide, napropamide and napropamide-M, tetrazolinones such fentrazamide, and other herbicides such as anilofos, cafenstrole, fenoxasulfone, ipfencarbazone, piperophos, pyroxasulfone, dimesulfazet and isoxazoline compounds of the formulae II.1, II.2, II.3, II.4, II.5, II.6, II.7, II.8 and II.9

[chemical structure]

[chemical structure]

[0676] the isoxazoline compounds of the formula (II) are known in the art, e.g. from WO 2006/024820, WO 2006/037945, WO 2007/071900 and WO 2007/096576;
[0677] among the VLCFA inhibitors, preference is given to chloroacetamides and oxyacetamides;
[0678] b11) from the group of the cellulose biosynthesis inhibitors:
[0679] chlorthiamid, dichlobenil, flupoxam, indaziflam, isoxaben, triaziflam and 1-cyclohexyl-5-pentafluorphenyloxy-1⁴-[1,2,4,6]thiatriazin-3-ylamine (CAS 175899-01-1);
[0680] b12) from the group of the decoupler herbicides:
[0681] dinoseb, dinoterb and DNOC and its salts;
[0682] b13) from the group of the auxinic herbicides:
[0683] 2,4-D and its salts and esters such as clacyfos, 2,4-DB and its salts and esters, aminocyclopyrachlor and its salts and esters, aminopyralid and its salts such as aminopyralid-dimethylammonium, aminopyralid-tris(2-hydroxypropyl)ammonium and its esters, benazolin, benazolin-ethyl, chloramben and its salts and esters, clomeprop, clopyralid and its salts and esters, dicamba and its salts and esters, dichlorprop and its salts and esters, dichlorprop-P and its salts and esters, flopyrauxifen, fluroxypyr, fluroxypyr-butometyl, fluroxypyr-meptyl, halauxifen and its salts and esters (CAS 943832-60-8); MCPA and its salts and esters, MCPA-thioethyl, MCPB and its salts and esters, mecoprop and its salts and esters, mecoprop-P and its salts and esters, picloram and its salts and esters, quinclorac, quinmerac, TBA (2,3,6) and its salts and esters, triclopyr and its salts and esters, florpyrauxifen, florpyrauxifen-benzyl (CAS 1390661-72-9) and 4-amino-3-chloro-5-fluoro-6-(7-fluoro-1H-indol-6-yl)picolinic acid (CAS 1629965-65-6);
[0684] b14) from the group of the auxin transport inhibitors: diflufenzopyr, diflufenzopyr-sodium, naptalam and naptalam-sodium;
[0685] b15) from the group of the other herbicides: bromobutide, chlorflurenol, chlorflurenol-methyl, cinmethylin, cumyluron, cyclopyrimorate and its salts and esters, dalapon, dazomet, difenzoquat, difenzoquat-metilsulfate, dimethipin, DSMA, dymron, endothal and its salts, etobenzanid, flurenol, flurenol-butyl, flurprimidol, fosamine, fosamine-ammonium, indanofan, maleic hydrazide, mefluidide, metam, methiozolin, methyl azide, methyl bromide, methyl-dymron, methyl iodide, MSMA, oleic acid, oxaziclomefone, pelargonic acid, pyributicarb, quinoclamine tetflupyrolimet, tridiphane, 6-chloro-4-(2,7-dimethyl-1-naphthyl)-5-hydroxy-2-methyl-pyridazin-3-one (CAS 2414510-21-5).

[0686] Active compounds B and C having a carboxyl group can be employed in the form of the acid, in the form of an agriculturally suitable salt as mentioned above or else in the form of an agriculturally acceptable derivative in the compositions according to the invention.

[0687] In the case of dicamba, suitable salts include those, where the counterion is an agriculturally acceptable cation. For example, suitable salts of dicamba are dicamba-sodium, dicamba-potassium, dicamba-methylammonium, dicamba-dimethylammonium, dicamba-isopropylammonium, dicamba-diglycolamine, dicamba-olamine, dicamba-diolamine, dicamba-trolamine, dicamba-N,N-bis-(3-aminopropyl)methylamine and dicamba-diethylenetriamine.

[0688] Examples of a suitable ester are dicamba-methyl and dicamba-butotyl.

[0689] Suitable salts of 2,4-D are 2,4-D-ammonium, 2,4-D-dimethylammonium, 2,4-D-diethylammonium, 2,4-D-diethanolammonium (2,4-D-diolamine), 2,4-D-triethanolammonium, 2,4-D-isopropylammonium, 2,4-D-triisopropanolammonium, 2,4-D-heptylammonium, 2,4-D-dodecylammonium, 2,4-D-tetradecylammonium, 2,4-D-triethylammonium, 2,4-D-tris(2-hydroxypropyl)ammonium, 2,4-D-tris(isopropyl)ammonium, 2,4-D-trolamine, 2,4-D-lithium, 2,4-D-sodium. Examples of suitable esters of 2,4-D are 2,4-D-butotyl, 2,4-D-2-butoxypropyl, 2,4-D-3-butoxypropyl, 2,4-D-butyl, 2,4-D-ethyl, 2,4-D-ethylhexyl, 2,4-D-isobutyl, 2,4-D-isooctyl, 2,4-D-isopropyl, 2,4-D-meptyl, 2,4-D-methyl, 2,4-D-octyl, 2,4-D-pentyl, 2,4-D-propyl, 2,4-D-tefuryl and clacyfos.

[0690] Suitable salts of 2,4-DB are for example 2,4-DB-sodium, 2,4-DB-potassium and 2,4-DB-dimethylammonium. Suitable esters of 2,4-DB are for example 2,4-DB-butyl and 2,4-DB-isoctyl.

[0691] Suitable salts of dichlorprop are for example dichlorprop-sodium, dichlorprop-potassium and dichlorprop-dimethylammonium. Examples of suitable esters of dichlorprop are dichlorprop-butotyl and dichlorprop-isoctyl.

[0692] Suitable salts and esters of MCPA include MCPA-butotyl, MCPA-butyl, MCPA-dimethyl-ammonium, MCPA-diolamine, MCPA-ethyl, MCPA-thioethyl, MCPA-2-ethylhexyl, MCPA-isobutyl, MCPA-isoctyl, MCPA-isopropyl, MCPA-isopropylammonium, MCPA-methyl, MCPA-olamine, MCPA-potassium, MCPA-sodium and MCPA-trolamine.

[0693] A suitable salt of MCPB is MCPB sodium. A suitable ester of MCPB is MCPB-ethyl.

[0694] Suitable salts of clopyralid are clopyralid-potassium, clopyralid-olamine and clopyralid-tris-(2-hydroxypropyl)ammonium. Example of suitable esters of clopyralid is clopyralid-methyl.

[0695] Examples of a suitable ester of fluroxypyr are fluroxypyr-meptyl and fluroxypyr-2-butoxy-1-methylethyl, wherein fluroxypyr-meptyl is preferred.

[0696] Suitable salts of picloram are picloram-dimethylammonium, picloram-potassium, picloram-triisopropanolammonium, picloram-triisopropylammonium and picloram-trolamine. A suitable ester of picloram is picloram-isoctyl.

[0697] A suitable salt of triclopyr is triclopyr-triethylammonium. Suitable esters of triclopyr are for example triclopyr-ethyl and triclopyr-butotyl.

[0698] Suitable salts and esters of chloramben include chloramben-ammonium, chloramben-diolamine chloramben-methyl, chloramben-methylammonium and chloramben-sodium. Suitable salts and esters of 2,3,6-TBA include 2,3,6-TBA-dimethylammonium, 2,3,6-TBA-lithium, 2,3,6-TBA-potassium and 2,3,6-TBA-sodium.

[0699] Suitable salts and esters of aminopyralid include aminopyralid-potassium, aminopyralid-dimethylammonium, and aminopyralid-tris(2-hydroxypropyl)ammonium.

[0700] Suitable salts of glyphosate are for example glyphosate-ammonium, glyphosate-diammonium, glyphoste-dimethylammonium, glyphosate-isopropylammonium, glyphosate-potassium, glyphosate-sodium, glyphosate-trimesium as well as the ethanolamine and diethanolamine salts, preferably glyphosate-diammonium, glyphosate-isopropylammonium and glyphosate-trimesium (sulfosate).

[0701] A suitable salt of glufosinate is for example glufosinate-ammonium.

[0702] A suitable salt of glufosinate-P is for example glufosinate-P-ammonium.

[0703] Suitable salts and esters of bromoxynil are for example bromoxynil-butyrate, bromoxynil-heptanoate, bromoxynil-octanoate, bromoxynil-potassium and bromoxynil-sodium.

[0704] Suitable salts and esters of ioxonil are for example ioxonil-octanoate, ioxonil-potassium and ioxonil-sodium.

[0705] Suitable salts and esters of mecoprop include mecoprop-butotyl, mecoprop-dimethylammonium mecoprop-diolamine, mecoprop-ethadyl, mecoprop-2-ethylhexyl, mecoprop-isoctyl, mecoprop-methyl, mecoprop-potassium, mecoprop-sodium and mecoprop-trolamine.

[0706] Suitable salts of mecoprop-P are for example mecoprop-P-butotyl, mecoprop-P-dimethylammonium, mecoprop-P-2-ethylhexyl, mecoprop-P-isobutyl, mecoprop-P-potassium and mecoprop-P-sodium.

[0707] A suitable salt of diflufenzopyr is for example diflufenzopyr-sodium.

[0708] A suitable salt of naptalam is for example naptalam-sodium.

[0709] Suitable salts and esters of aminocyclopyrachlor are for example aminocyclopyrachlor-dimethylammonium, aminocyclopyrachlor-methyl, aminocyclopyrachlor-triisopropanolammonium, aminocyclopyrachlor-sodium and aminocyclopyrachlor-potassium.

[0710] A suitable salt of quinclorac is for example quinclorac-dimethylammonium.

[0711] A suitable salt of quinmerac is for example quinmerac-dimethylammonium.

[0712] A suitable salt of imazamox is for example imazamox-ammonium.

[0713] Suitable salts of imazapic are for example imazapic-ammonium and imazapic-isopropylammonium.

[0714] Suitable salts of imazapyr are for example imazapyr-ammonium and imazapyr-isopropylammonium.

[0715] A suitable salt of imazaquin is for example imazaquin-ammonium.

[0716] Suitable salts of imazethapyr are for example imazethapyr-ammonium and imazethapyr-isopropylammonium.

[0717] A suitable salt of topramezone is for example topramezone-sodium.

[0718] Particularly preferred herbicides B are the herbicides B as defined above; in particular the herbicides B.1-B.215:

TABLE B

| | Herbicide B |
|---|---|
| B.1 | clethodim |
| B.2 | clodinafop-propargyl |
| B.3 | cycloxydim |
| B.4 | cyhalofop-butyl |
| B.5 | fenoxaprop-ethyl |
| B.6 | fenoxaprop-P-ethyl |
| B.7 | metamifop |
| B.8 | pinoxaden |
| B.9 | profoxydim |
| B.10 | sethoxydim |
| B.11 | tepraloxydim |
| B.12 | tralkoxydim |
| B.13 | esprocarb |
| B.14 | ethofumesate |
| B.15 | molinate |
| B.16 | prosulfocarb |
| B.17 | thiobencarb |
| B.18 | triallate |
| B.19 | bensulfuron-methyl |
| B.20 | bispyribac-sodium |
| B.21 | cloransulam-methyl |
| B.22 | chlorsulfuron |
| B.23 | clorimuron |
| B.24 | cyclosulfamuron |
| B.25 | diclosulam |
| B.26 | florasulam |
| B.27 | flumetsulam |
| B.28 | flupyrsulfuron-methyl-sodium |
| B.29 | foramsulfuron |
| B.30 | imazamox |
| B.31 | imazamox-ammonium |
| B.32 | imazapic |
| B.33 | imazapic-ammonium |
| B.34 | imazapic-isopropylammonium |
| B.35 | imazapyr |
| B.36 | imazapyr-ammonium |
| B.37 | imazapyr-isopropylammonium |
| B.38 | imazaquin |
| B.39 | imazaquin-ammonium |
| B.40 | imazethapyr |
| B.41 | imazethapyr-ammonium |
| B.42 | imazethapyr- |
| | isopropylammonium |
| B.43 | imazosulfuron |
| B.44 | iodosulfuron-methyl-sodium |
| B.45 | iofensulfuron |
| B.46 | iofensulfuron-sodium |
| B.47 | mesosulfuron-methyl |
| B.48 | metazosulfuron |
| B.49 | metsulfuron-methyl |
| B.50 | metosulam |
| B.51 | nicosulfuron |
| B.52 | penoxsulam |
| B.53 | propoxycarbazon-sodium |
| B.54 | pyrazosulfuron-ethyl |
| B.55 | pyribenzoxim |
| B.56 | pyriftalid |
| B.57 | pyroxsulam |
| B.58 | propyrisulfuron |
| B.59 | rimsulfuron |
| B.60 | sulfosulfuron |
| B.61 | thiencarbazone-methyl |
| B.62 | thifensulfuron-methyl |
| B.63 | tribenuron-methyl |
| B.64 | tritosulfuron |
| B.65 | triafamone |
| B.66 | ametryne |
| B.67 | atrazine |
| B.68 | bentazon |
| B.69 | bromoxynil |
| B.70 | bromoxynil-octanoate |
| B.71 | bromoxynil-heptanoate |
| B.72 | bromoxynil-potassium |
| B.73 | diuron |
| B.74 | fluometuron |
| B.75 | hexazinone |
| B.76 | isoproturon |
| B.77 | linuron |
| B.78 | metamitron |
| B.79 | metribuzin |
| B.80 | propanil |
| B.81 | simazin |
| B.82 | terbuthylazine |
| B.83 | terbutryn |
| B.84 | paraquat-dichloride |
| B.85 | acifluorfen |
| B.86 | butafenacil |
| B.87 | carfentrazone-ethyl |
| B.88 | flumioxazin |
| B.89 | fomesafen |
| B.90 | oxadiargyl |
| B.91 | oxyfluorfen |
| B.92 | pyraflufen |
| B.93 | pyraflufen-ethyl |
| B.94 | saflufenacil |
| B.95 | sulfentrazone |
| B.96 | trifludimoxazin |
| B.97 | epyrifenacil |
| B.98 | benzobicyclon |
| B.99 | bicyclopyrone |
| B.100 | clomazone |
| B.101 | diflufenican |
| B.102 | flurochloridone |
| B.103 | isoxaflutole |
| B.104 | mesotrione |
| B.105 | norflurazone |
| B.106 | picolinafen |
| B.107 | sulcotrione |
| B.108 | tefuryltrione |
| B.109 | tembotrione |
| B.110 | tolpyralate |
| B.111 | topramezone |
| B.112 | topramezone-sodium |
| B.113 | amitrole |
| B.114 | fluometuron |
| B.115 | fenquinotrione |
| B.116 | glyphosate |
| B.117 | glyphosate-ammonium |
| B.118 | glyphosate-dimethylammonium |
| B.119 | glyphosate-isopropylammonium |
| B.120 | glyphosate-trimesium |
| | (sulfosate) |
| B.121 | glyphosate-potassium |
| B.122 | glufosinate |
| B.123 | glufosinate-ammonium |
| B.124 | glufosinate-P |
| B.125 | glufosinate-P-ammonium |
| B.126 | pendimethalin |
| B.127 | trifluralin |
| B.128 | acetochlor |
| B.129 | butachlor |
| B.130 | cafenstrole |
| B.131 | dimethenamid-P |
| B.132 | fentrazamide |
| B.133 | flufenacet |
| B.134 | mefenacet |
| B.135 | metazachlor |
| B.136 | metolachlor |
| B.137 | S-metolachlor |
| B.138 | pretilachlor |
| B.139 | fenoxasulfone |
| B.140 | indaziflam |
| B.141 | isoxaben |
| B.142 | triaziflam |
| B.143 | ipfencarbazone |
| B.144 | pyroxasulfone |
| B.145 | 2,4-D |
| B.146 | 2,4-D-isobutyl |
| B.147 | 2,4-D-dimethylammonium |
| B.148 | 2,4-D-N,N,N- |
| | trimethylethanolammonium |
| B.149 | aminopyralid |
| B.150 | aminopyralid-methyl |
| B.151 | aminopyralid-dimethyl- |
| | ammonium |
| B.152 | aminopyralid-tris(2- |
| | hydroxypropyl)ammonium |
| B.153 | clopyralid |
| B.154 | clopyralid-methyl |
| B.155 | clopyralid-olamine |
| B.156 | dicamba |
| B.157 | dicamba-butotyl |
| B.158 | dicamba-diglycolamine |
| B.159 | dicamba-dimethylammonium |
| B.160 | dicamba-diolamine |
| B.161 | dicamba-isopropylammonium |
| B.162 | dicamba-potassium |
| B.163 | dicamba-sodium |
| B.164 | dicamba-trolamine |
| B.165 | dicamba-N,N-bis-(3- |
| | aminopropyl)methylamine |
| B.166 | dicamba-diethylenetriamine |
| B.167 | fluroxypyr |
| B.168 | fluroxypyr-meptyl |
| B.169 | halauxifen |
| B.170 | halauxifen-methyl |
| B.171 | MCPA |
| B.172 | MCPA-2-ethylhexyl |
| B.173 | MCPA-dimethylammonium |
| B.174 | quinclorac |
| B.175 | quinclorac-dimethylammonium |
| B.176 | quinmerac |
| B.177 | quinmerac-dimethylammonium |
| B.178 | florpyrauxifen |
| B.179 | florpyrauxifen-benzyl (CAS |
| | 1390661-72-9) |
| B.180 | aminocyclopyrachlor |
| B.181 | aminocyclopyrachlor-potassium |
| B.182 | aminocyclopyrachlor-methyl |
| B.183 | diflufenzopyr |
| B.184 | diflufenzopyr-sodium |
| B.185 | dymron |
| B.186 | indanofan |
| B.187 | oxaziclomefone |
| B.188 | II.1 |
| B.189 | II.2 |
| B.190 | II.3 |
| B.191 | II.4 |
| B.192 | II.5 |
| B.193 | II.6 |
| B.194 | II.7 |
| B.195 | II.8 |
| B.196 | II.9 |
| B.197 | 4-amino-3-chloro-5-fluoro-6-(7- |
| | fluoro-1H-indol-6-yl)picolinic |
| | acid (CAS 1629965-65-6) |
| B.198 | flopyrauxifen |
| B.199 | oxotrione (CAS 1486617-21-3) |
| B.200 | cinmethylin |
| B.201 | 2-chloro-3-methylsulfanyl-N-(1- |
| | methyltetrazol-5-yl)-4- |
| | (trifluoromethyl)benzamide |
| | (CAS 1361139-71-0) |
| B.202 | bixlozone |
| B.203 | cyclopyranil |
| B.204 | 2-[2-chloro-5-[3-chloro-5- |
| | (trifluoromethyl)-2-pyridinyl]-4- |
| | fluorophenoxy]-2-methoxy- |
| | acetic acid methyl ester (CAS |
| | 1970221-16-9) |
| B.205 | 2-[2-[[3-chloro-6-[3,6-dihydro-3- |
| | methyl-2,6-dioxo-4- |
| | (trifluoromethyl)-1(2H)- |
| | pyrimidinyl]-5-fluoro-2- |
| | pyridinyl]oxy]phenoxy]-acetic |
| | acid methyl ester (CAS |
| | 2158274-96-3) |
| B.206 | 2-[2-[[3-chloro-6-[3,6-dihydro-3- |
| | methyl-2,6-dioxo-4- |
| | (trifluoromethyl)-1(2H)- |
| | pyrimidinyl]-5-fluoro-2- |
| | pyridinyl]oxy]phenoxy] acetic |
| | acid ethyl ester (CAS 2158274- |
| | 50-9) |
| B.207 | methyl 2-[[3-[2-chloro-5-[4- |
| | (difluoromethyl)-3-methyl-5- |
| | oxo-1,2,4-triazol-1-yl]-4-fluoro- |
| | phenoxy]-2-pyridyl]oxy]acetate |
| B.208 | ethyl 2-[[3-[2-chloro-5-[4- |
| | (difluoromethyl)-3-methyl-5- |
| | oxo-1,2,4-triazol-1-yl]-4-fluoro- |
| | phenoxy]-2-pyridyl]oxy]acetate |
| | (CAS 2230679-62-4) |
| B.209 | 2-[[3-[[3-chloro-6-[3,6-dihydro- |
| | 3-methyl-2,6-dioxo-4- |
| | (trifluoromethyl)-1(2H)- |
| | pyrimidinyl]-5-fluoro-2- |
| | pyridinyl]oxy]-2-pyridinyl]oxy]- |
| | acetic acid methyl ester (CAS |
| | 2158275-73-9) |
| B.210 | 2-[[3-[[3-chloro-6-[3,6-dihydro- |
| | 3-methyl-2,6-dioxo-4- |
| | (trifluoromethyl)-1(2H)- |
| | pyrimidinyl]-5-fluoro-2- |
| | pyridinyl]oxy]-2-pyridinyl]oxy] |
| | acetic acid ethyl ester (CAS |
| | 2158274-56-5) |
| B.211 | 2-[2-[[3-chloro-6-[3,6-dihydro-3- |
| | methyl-2,6-dioxo-4- |
| | (trifluoromethyl)-1(2H)- |
| | pyrimidinyl]-5-fluoro-2- |
| | pyridinyl]oxy]phenoxy]-N- |
| | (methylsulfonyl)-acetamide |
| | (CAS 2158274-53-2) |
| B.212 | 2-[[3-[[3-chloro-6-[3,6-dihydro- |
| | 3-methyl-2,6-dioxo-4- |
| | (trifluoromethyl)-1(2H)- |
| | pyrimidinyl]-5-fluoro-2- |
| | pyridinyl]oxy]-2-pyridinyl]oxy]- |
| | N-(methylsulfonyl)-acetamide |
| | (CAS 2158276-22-1) |
| B.213 | tetflupyrolimet |
| B.214 | rimisoxafen |
| B.215 | 3-[2-chloro-5-[3,6-dihydro-3- |
| | methyl-2,6-dioxo-4- |
| | (trifluoromethyl)-1(2H)- |
| | pyrimidinyl]-4-fluorophenyl]-4,5- |
| | dihydro-5-methyl-5- |
| | isoxazolecarboxylic acid ethyl |
| | ester (CAS 1949837-17-5) |

[0719] Moreover, it may be useful to apply the phenyluracils of formula (I) in combination with safeners. Safeners are chemical compounds which prevent or reduce damage on useful plants without having a major impact on the herbicidal action of the phenyluracils of formula (I) towards unwanted plants. They can be applied either before sowings (e.g. on seed treatments, shoots or seedlings) or in the pre-emergence application or post-emergence application of the useful plant. The safeners and the phenyluracils of formula (I) and optionally the herbicides B can be applied simultaneously or in succession.

[0720] In another embodiment of the present invention the compositions useful for the present invention comprise at least one phenyluracil of formula (I) and at least one safener C (component C).

[0721] Suitable safeners are e.g. (quinolin-8-oxy)acetic acids, 1-phenyl-5-haloalkyl-1H-1,2,4-triazol-3-carboxylic acids, 1-phenyl-4,5-dihydro-5-alkyl-1H-pyrazol-3,5-dicarboxylic acids, 4,5-dihydro-5,5-diaryl-3-isoxazol carboxylic acids, dichloroacetamides, alpha-oximinophenylacetonitriles, acetophenonoximes, 4,6-dihalo-2-phenylpyrimidines, N-[[4-(aminocarbonyl)phenyl]sulfonyl]-2-benzoic amides, 1,8-naphthalic anhydride, 2-halo-4-(haloalkyl)-5-thiazol carboxylic acids, phosphorthiolates and N-alkyl-O-phenylcarbamates and their agriculturally acceptable salts and their agriculturally acceptable derivatives such amides, esters, and thioesters, provided they have an acid group.

[0722] Examples of preferred safeners C are benoxacor, cloquintocet, cyometrinil, cyprosulfamide, dichlormid, dicyclonon, dietholate, fenchlorazole, fenclorim, flurazole, fluxofenim, furilazole, isoxadifen, mefenpyr, mephenate, naphthalic anhydride, oxabetrinil, 4-(dichloroacetyl)-1-oxa-4-azaspiro[4.5]decane (MON4660, CAS 71526-07-3), 2,2,5-trimethyl-3-(dichloroacetyl)-1,3-oxazolidine (R-29148, CAS 52836-31-4), metcamifen and BPCMS (CAS 54091-06-4); especially preferred benoxacor, cloquintocet, cyometrinil, cyprosulfamide, dichlormid, dicyclonon, dietholate, fenchlorazole, fenclorim, flurazole, fluxofenim, furilazole, isoxadifen, mefenpyr, mephenate, naphthalic anhydride, oxabetrinil, 4-(dichloroacetyl)-1-oxa-4-azaspiro[4.5]decane (MON4660, CAS 71526-07-3), 2,2,5-trimethyl-3-(dichloroacetyl)-1,3-oxazolidine (R-29148, CAS 52836-31-4) and metcamifen.

[0723] Particularly preferred safeners C, which, as component C, are constituent of the composition according to the invention are the safeners C as defined above; in particular the safeners C.1-C.17 listed below in table C:

TABLE C

| | Safener C |
|---|---|
| C.1 | benoxacor |
| C.2 | cloquintocet |
| C.3 | cloquintocet-mexyl |
| C.4 | cyprosulfamide |
| C.5 | dichlormid |
| C.6 | fenchlorazole |
| C.7 | fenchlorazole-ethyl |
| C.8 | fenclorim |
| C.9 | furilazole |
| C.10 | isoxadifen |
| C.11 | isoxadifen-ethyl |
| C.12 | mefenpyr |
| C.13 | mefenpyr-diethyl |
| C.14 | naphtalic acid anhydride |
| C.15 | 4-(dichloroacetyl)-1-oxa-4-azaspiro[4.5]decane |
| | (CAS 71526-07-3) |
| C.16 | 2,2,5-trimethyl-3-(dichloroacetyl)-1,3-oxazolidine |
| | (CAS 52836-31-4) |
| C.17 | metcamifen |

[0724] The active compounds B of groups b1) to b15) and the active compounds C are known herbicides and safeners, see, for example, The Compendium of Pesticide Common Names (http://www.alanwood.net/pesticides/); Farm Chemicals Handbook 2000 volume 86, Meister Publishing Company, 2000; B. Hock, C. Fedtke, R. R. Schmidt, Herbizide [Herbicides], Georg Thieme Verlag, Stuttgart 1995; W. H. Ahrens, Herbicide Handbook, 7th edition, Weed Science Society of America, 1994; and K. K. Hatzios, Herbicide Handbook, Supplement for the 7th edition, Weed Science Society of America, 1998. 2,2,5-Trimethyl-3-(dichloroacetyl)-1,3-oxazolidine [CAS No. 52836-31-4] is also referred to as R-29148. 4-(Dichloroacetyl)-1-oxa-4-azaspiro[4.5]decane [CAS No. 71526-07-3] is also referred to as AD-67 and MON 4660.

[0725] The assignment of the active compounds to the respective mechanisms of action is based on current knowledge. If several mechanisms of action apply to one active compound, this substance was only assigned to one mechanism of action.

[0726] It is generally preferred to use the compounds useful for the invention in combination with herbicides that are selective for the crop being treated and which complement the spectrum of weeds controlled by these compounds at the application rate employed. It is further generally preferred to apply the compounds of the invention and other complementary herbicides at the same time, either as a combination formulation or as a tank mix.

[0727] It is recognized that the polynucleotide molecules and polypeptides of the invention encompass polypeptides comprising an amino acid sequence that is sufficiently identical to the amino acid sequences set forth in SEQ ID Nos: 1, 2, 3, 4, 5, 6, 7, 8, 9, 10, 11, 12, 13, 14, 15, 16, 17, 18, 19, 20, 21, 22, 23, 24, 25, 26, 27, 28, 29, 30, 31, 32, 33, 34, 35, 36, 37, 38, 39, 40, 41, 42, 43, 44, 45, 46, 47, 48, 49, 50, 51, 52, 53, 54, 55, 56, 57, 58, 59, 60, 61, 62, 63, 64, 65, 66, 67, 68, 69, 70, 71, 72, 73, 74, 75, 76, 77, 78, 79, 80, 81, 82, 83, 84, 85, 86, 87, 88, 89, 90, 91, 92, 93, 94, 95, 96, 97, 98, 99, 100, 101, 102, 103, 104, 105, 106, 107, 108, 109, 110, 111, 112, 113, 114, 115, 116, 117, 265, 266, 267, 268, 269, 270, 271, 272, 273, 274, 275, 276, 277, 278, 279, 280, 281, 282, 283, 284, 285, 286, 287, 288, 289, 290, 291, 292, 293, 294, 295, 296, 297, 298, 299, 300, 301, 302, 303, 304,305, 306, 307, 308, 309, 310, 311, 312, 313, 314, 315, 316, 317, 318, 319, 320, 321, 322, 323, 324, 325, 326, 327328, 329, 330, 331, 332, 333, 334, 335, 336, 337, 338, 339, 340, 341, 342, 343, 344, 345, 346, 347, 348, 349, 350, 351, 352, 353, 354, 355, 356, 357, 358, 359, 360, 361, 362, 363, 364, 365, 366, 367, 368, 369, 370, 371, 372, 373, 374, 375, 376, 377, 378, 379, 380, 381, 382, 383, 384, 385, 386, 387, 388, 389, 390, 391, 392, 393, 394, 395, 396, 397, 398, 399, 400, 401, 402, 403, 404, 405, 406, 407, 408, 409, 410, 411, 412, 413, 414, 415, 416, 417, 418, 419, 420, 421, 422, 423, 424, 425, 426, 427, 428, 429, 430, 431, 432, 433, 434, 435, 436, 437, 438, 439, 440, 441, 442, 443, 444, 445, 446, 447, 448, 449, 450, 451, 452, 453, 454, 455, 456, 457, 458, 459, 460, 461, 462, 463, 464, 465, 466, 467, 468, 469, 470, 471, 472, 473, 474, 475, 476, 477, 478, 479, 480, 481, 482, 483, 484, 485, 486, 487, 488, 489, 490, 491, 492, 493, 494, 495, 496, 497, 498, 499, 500, 501, 502, 503, 504, 505, 506, 507, 508, 509, 510, 511, 512, 513, 514, 515, 516, 517, 518, 519, 520, 521, 522, 523, 524, 525, 526, 527, 528, 529, 530, 531, 532, 533, 534, 535, 536, 537, 538, 539, 540, 541, 542, 543, 544, 545, 546, 547, 548, 549, 550, 551, 552, 553, 554, 555, 556, 557, 558, 559, 560, 561, 562, 563, 564, 565, 577, 579, 581, 583, 585, 587, 589, 591, 593, 595, 597, 599, 601, 603, 605, 607, 609, 611, 613, 615, 617, 619, 621, 623, 625, 627, 637, 651; 652; 653; 654; 655; 656; 657; 658; 659; 660; 661; 662; 663; 664; 665; 666; 667; 668; 669; 670; 671, 714; 715; 716; 717; 718; 719; 720; 721; 722; 723; 724; 725; 726; 727; 728; 729; 730; 731; 732; 733; 734; 735; 736; 737; 738, 795, 882, 883, 884, 885, 886, 887, 888, 889, 890, 891, 892, 893, 894, 895, 896, 897, 898, 899, 900, 901, 902, 903, 904, 905, 906, 907, 908, 909, 910, 911, 912, 913, 914, 915, 916, 917, 918, 919, 920, 921, 922, 923, 924, 925, 926, 927, 928, 929, 930, 931, 932, 933, 934, 935, 936, 937, 938, 939, 940, 941, 942, 943, 944, 945, 946, 947, 948, 949, 950, 951, 952, 953, 954, 955, 956, 957, 958, 959, 960, or a variant or homologue thereof. The term “sufficiently identical” is used herein to refer to a first amino acid or nucleotide sequence that contains a sufficient or minimum number of identical or equivalent (e.g., with a similar side chain) amino acid residues or nucleotides to a second amino acid or nucleotide sequence such that the first and second amino acid or nucleotide sequences have a common structural domain and/or common functional activity.

[0728] Generally, “sequence identity” refers to the extent to which two optimally aligned DNA or amino acid sequences are invariant throughout a window of alignment of components, e.g., nucleotides or amino acids. An “identity fraction” for aligned segments of a test sequence and a reference sequence is the number of identical components that are shared by the two aligned sequences divided by the total number of components in reference sequence segment, i.e., the entire reference sequence or a smaller defined part of the reference sequence. “Percent identity” is the identity fraction times 100. Optimal alignment of sequences for aligning a comparison window are well known to those skilled in the art and may be conducted by tools such as the local homology algorithm of Smith and Waterman, the homology alignment algorithm of Needleman and Wunsch, the search for similarity method of Pearson and Lipman, and preferably by computerized implementations of these algorithms such as GAP, BESTFIT, FASTA, and TFASTA available as part of the GCG. Wisconsin Package. (Accelrys Inc. Burlington, Mass.)

### Polynucleotides and Oligonucleotides

[0729] By an “isolated polynucleotide”, including DNA, RNA, or a combination of these, single or double stranded, in the sense or antisense orientation or a combination of both, dsRNA or otherwise, we mean a polynucleotide which is at least partially separated from the polynucleotide sequences with which it is associated or linked in its native state. That means other nucleic acid molecules are present in an amount less than 5% based on weight of the amount of the desired nucleic acid, preferably less than 2% by weight, more preferably less than 1% by weight, most preferably less than 0.5% by weight. Preferably, an “isolated” nucleic acid is free of some of the sequences that naturally flank the nucleic acid (i.e., sequences located at the 5′ and 3′ ends of the nucleic acid) in the genomic DNA of the organism from which the nucleic acid is derived. For example, in various embodiments, the isolated herbicide resistance and/or tolerance related protein encoding nucleic acid molecule can contain less than about 5 kb, 4 kb, 3 kb, 2 kb, 1 kb, 0.5 kb or 0.1 kb of nucleotide sequences which naturally flank the nucleic acid molecule in genomic DNA of the cell from which the nucleic acid is derived. Moreover, an “isolated” nucleic acid molecule, such as a cDNA molecule, can be free from some of the other cellular material with which it is naturally associated, or culture medium when produced by recombinant techniques, or chemical precursors or other chemicals when chemically synthesized. Preferably, the isolated polynucleotide is at least 60% free, preferably at least 75% free, and most preferably at least 90% free from other components with which they are naturally associated. As the skilled addressee would be aware, an isolated polynucleotide can be an exogenous polynucleotide present in, for example, a transgenic organism which does not naturally comprise the polynucleotide. Furthermore, the terms “polynucleotide(s)”, “nucleic acid sequence(s)”, “nucleotide sequence(s)”, “nucleic acid(s)”, “nucleic acid molecule” are used interchangeably herein and refer to nucleotides, either ribonucleotides or deoxyribonucleotides or a combination of both, in a polymeric unbranched form of any length.

[0730] The term “mutated PPO nucleic acid” refers to a PPO nucleic acid having a sequence that is mutated from a wild-type PPO nucleic acid, such as e.g. SEQ ID NO: 118, 119, 120, 121, 122, 123, 124, 125, 126, 127, 128, 624, 626, or 650, or homologues, paralogues and orthologues thereof; and that confers increased phenyluracil herbicide tolerance to a plant in which it is expressed.

[0731] Furthermore, the term “mutated protoporphyrinogen oxidase (mutated PPO)” refers to the replacement of an amino acid of the wild-type primary sequences SEQ ID NO: 1, 2, 3, 4, 5, 6, 7, 8, 9, 10, 11, 12, 13, 14, 15, 16, 17, 18, 19, 20, 21, 22, 23, 24, 25, 26, 27, 28, 29, 30, 31, 32, 33, 34, 35, 36, 37, 38, 39, 40, 41, 42, 43, 44, 45, 46, 47, 48, 49, 50, 51, 52, 53, 54, 55, 56, 57, 58, 59, 60, 61, 62, 63, 64, 65, 66, 67, 68, 69, 70, 71, 72, 73, 74, 75, 76, 77, 78, 79, 80, 81, 82, 83, 84, 85, 86, 87, 88, 89, 90, 91, 92, 93, 94, 95, 96, 97, 98, 99, 100, 101, 102, 103, 104, 105, 106, 107, 108, 109, 110, 111, 112, 113, 114, 115, 116, 117, 577, 579, 581, 583, 585, 587, 589, 591, 593, 595, 597, 599, 601, 603, 605, 607, 609, 611, 613, 615, 617, 619, 621, 623, 625, 627, 637, 651; 652; 653; 654; 655; 656; 657; 658; 659; 660; 661; 662; 663; 664; 665; 666; 667; 668; 669; 670; 671, 714; 715; 716; 717; 718; 719; 720; 721; 722; 723; 724; 725; 726; 727; 728; 729; 730; 731; 732; 733; 734; 735; 736; 737; 738, 795, 882, 883, 884, 885, 886, 887, 888, 889, 890, 891, 892, 893, 894, 895, 896, 897, 898, 899, 900, 901, 902, 903, 904, 905, 906, 907, 908, 909, 910, 911, 912, 913, 914, 915, 916, 917, 918, 919, 920, 921, 922, 923, 924, 925, 926, 927, 928, 929, 930, 931, 932, 933, 934, 935, 936, 937, 938, 939, 940, 941, 942, 943, 944, 945, 946, 947, 948, 949, 950, 951, 952, 953, 954, 955, 956, 957, 958, 959, 960, or a variant, a derivative, a homologue, an orthologue, or paralogue thereof, with another amino acid. The expression “mutated amino acid” will be used below to designate the amino acid which is replaced by another amino acid, thereby designating the site of the mutation in the primary sequence of the protein.

[0732] In a preferred embodiment, the PPO nucleotide sequence encoding a mutated PPO comprises the sequence of SEQ ID NO: 118, 119, 120, 121, 122, 123, 124, 125, 126, 127, 128, 624, 626, or 650, or a variant or derivative thereof.

[0733] Furthermore, it will be understood by the person skilled in the art that the PPO nucleotide sequences encompasse homologues, paralogues and and orthologues of SEQ ID NO: 118, 119, 120, 121, 122, 123, 124, 125, 126, 127, 128, 624, 626, or 650, as defined hereinafter.

[0734] The term “variant” with respect to a sequence (e.g., a polypeptide or nucleic acid sequence such as—for example—a transcription regulating nucleotide sequence of the invention) is intended to mean substantially similar sequences. For nucleotide sequences comprising an open reading frame, variants include those sequences that, because of the degeneracy of the genetic code, encode the identical amino acid sequence of the native protein. Naturally occurring allelic variants such as these can be identified with the use of well-known molecular biology techniques, as, for example, with polymerase chain reaction (PCR) and hybridization techniques. Variant nucleotide sequences also include synthetically derived nucleotide sequences, such as those generated, for example, by using site-directed mutagenesis and for open reading frames, encode the native protein, as well as those that encode a polypeptide having amino acid substitutions relative to the native protein, e.g. the mutated PPO according to the present invention as disclosed herein.

[0735] Generally, nucleotide sequence variants of the invention will have at least 30, 40, 50, 60, to 70%, e.g., preferably 71%, 72%, 73%, 74%, 75%, 76%, 77%, 78%, to 79%, generally at least 80%, e.g., 81%-84%, at least 85%, e.g., 86%, 87%, 88%, 89%, 90%, 91%, 92%, 93%, 94%, 95%, 96%, 97%, to 98% and 99% nucleotide “sequence identity” to the nucleotide sequence encoding a polypeptide of SEQ ID NO: 1, 2, 3, 4, 5, 6, 7, 8, 9, 10, 11, 12, 13, 14, 15, 16, 17, 18, 19, 20, 21, 22, 23, 24, 25, 26, 27, 28, 29, 30, 31, 32, 33, 34, 35, 36, 37, 38, 39, 40, 41, 42, 43, 44, 45, 46, 47, 48, 49, 50, 51, 52, 53, 54, 55, 56, 57, 58, 59, 60, 61, 62, 63, 64, 65, 66, 67, 68, 69, 70, 71, 72, 73, 74, 75, 76, 77, 78, 79, 80, 81, 82, 83, 84, 85, 86, 87, 88, 89, 90, 91, 92, 93, 94, 95, 96, 97, 98, 99, 100, 101, 102, 103, 104, 105, 106, 107, 108, 109, 110, 111, 112, 113, 114, 115, 116, 117, 265, 266, 267, 268, 269, 270, 271, 272, 273, 274, 275, 276, 277, 278, 279, 280, 281, 282, 283, 284, 285, 286, 287, 288, 289, 290, 291, 292, 293, 294, 295, 296, 297, 298, 299, 300, 301, 302, 303, 304, 305, 306, 307, 308, 309, 310, 311, 312, 313, 314, 315, 316, 317, 318, 319, 320, 321, 322, 323, 324, 325, 326, 327328, 329, 330, 331, 332, 333, 334, 335, 336, 337, 338, 339, 340, 341, 342, 343, 344, 345, 346, 347, 348, 349, 350, 351, 352, 353, 354, 355, 356, 357, 358, 359, 360, 361, 362, 363, 364, 365, 366, 367, 368, 369, 370, 371, 372, 373, 374, 375, 376, 377, 378, 379, 380, 381, 382, 383, 384, 385, 386, 387, 388, 389, 390, 391, 392, 393, 394, 395, 396, 397, 398, 399, 400, 401, 402, 403, 404, 405, 406, 407, 408, 409, 410, 411, 412, 413, 414, 415, 416, 417, 418, 419, 420, 421, 422, 423, 424, 425, 426, 427, 428, 429, 430, 431, 432, 433, 434, 435, 436, 437, 438, 439, 440, 441, 442, 443, 444, 445, 446, 447, 448, 449, 450, 451, 452, 453, 454, 455, 456, 457, 458, 459, 460, 461, 462, 463, 464, 465, 466, 467, 468, 469, 470, 471, 472, 473, 474, 475, 476, 477, 478, 479, 480, 481, 482, 483, 484, 485, 486, 487, 488, 489, 490, 491, 492, 493, 494, 495, 496, 497, 498, 499, 500, 501, 502, 503, 504, 505, 506, 507, 508, 509, 510, 511, 512, 513, 514, 515, 516, 517, 518, 519, 520, 521, 522, 523, 524, 525, 526, 527, 528, 529, 530, 531, 532, 533, 534, 535, 536, 537, 538, 539, 540, 541, 542, 543, 544, 545, 546, 547, 548, 549, 550, 551, 552, 553, 554, 555, 556, 557, 558, 559, 560, 561, 562, 563, 564, 565, 577, 579, 581, 583, 585, 587, 589, 591, 593, 595, 597, 599, 601, 603, 605, 607, 609, 611, 613, 615, 617, 619, 621, 623, 625, 627, 637, 651; 652; 653; 654; 655; 656; 657; 658; 659; 660; 661; 662; 663; 664; 665; 666; 667; 668; 669; 670; 671, 714; 715; 716; 717; 718; 719; 720; 721; 722; 723; 724; 725; 726; 727; 728; 729; 730; 731; 732; 733; 734; 735; 736; 737; 738, 795, 882, 883, 884, 885, 886, 887, 888, 889, 890, 891, 892, 893, 894, 895, 896, 897, 898, 899, 900, 901, 902, 903, 904, 905, 906, 907, 908, 909, 910, 911, 912, 913, 914, 915, 916, 917, 918, 919, 920, 921, 922, 923, 924, 925, 926, 927, 928, 929, 930, 931, 932, 933, 934, 935, 936, 937, 938, 939, 940, 941, 942, 943, 944, 945, 946, 947, 948, 949, 950, 951, 952, 953, 954, 955, 956, 957, 958, 959, 960, or a variant, a derivative, a homologue, an orthologue, or paralogue thereof.

[0736] The % identity of a polynucleotide is determined by GAP (Needleman and Wunsch, 1970) analysis (GCG program) with a gap creation penalty=5, and a gap extension penalty=0.3. Unless stated otherwise, the query sequence is at least 45 nucleotides in length, and the GAP analysis aligns the two sequences over a region of at least 45 nucleotides. Preferably, the query sequence is at least 150 nucleotides in length, and the GAP analysis aligns the two sequences over a region of at least 150 nucleotides. More preferably, the query sequence is at least 300 nucleotides in length and the GAP analysis aligns the two sequences over a region of at least 300 nucleotides. Even more preferably, the GAP analysis aligns the two sequences over their entire length.

### Polypeptides

[0737] By “substantially purified polypeptide” or “purified” a polypeptide is meant that has been separated from one or more lipids, nucleic acids, other polypeptides, or other contaminating molecules with which it is associated in its native state. It is preferred that the substantially purified polypeptide is at least 60% free, more preferably at least 75% free, and more preferably at least 90% free from other components with which it is naturally associated. As the skilled addressee will appreciate, the purified polypeptide can be a recombinantly produced polypeptide. The terms “polypeptide” and “protein” are generally used interchangeably and refer to a single polypeptide chain which may or may not be modified by addition of non-amino acid groups. It would be understood that such polypeptide chains may associate with other polypeptides or proteins or other molecules such as co-factors. The terms “proteins” and “polypeptides” as used herein also include variants, mutants, modifications, analogous and/or derivatives of the polypeptides of the invention as described herein.

[0738] The % identity of a polypeptide is determined by GAP (Needleman and Wunsch, 1970) analysis (GCG program) with a gap creation penalty=5, and a gap extension penalty=0.3. The query sequence is at least 25 amino acids in length, and the GAP analysis aligns the two sequences over a region of at least 25 amino acids. More preferably, the query sequence is at least 50 amino acids in length, and the GAP analysis aligns the two sequences over a region of at least 50 amino acids. More preferably, the query sequence is at least 100 amino acids in length and the GAP analysis aligns the two sequences over a region of at least 100 amino acids. Even more preferably, the query sequence is at least 250 amino acids in length and the GAP analysis aligns the two sequences over a region of at least 250 amino acids. Even more preferably, the GAP analysis aligns the two sequences over their entire length.

[0739] With regard to a defined polypeptide, it will be appreciated that % identity figures higher than those provided above will encompass preferred embodiments. Thus, where applicable, in light of the minimum % identity figures, it is preferred that the PPO polypeptide of the invention comprises an amino acid sequence which is at least 40%, more preferably at least 45%, more preferably at least 50%, more preferably at least 55%, more preferably at least 60%, more preferably at least 65%, more preferably at least 70%, more preferably at least 75%, more preferably at least 80%, more preferably at least 85%, more preferably at least 90%, more preferably at least 91%, more preferably at least 92%, more preferably at least 93%, more preferably at least 94%, more preferably at least 95%, more preferably at least 96%, more preferably at least 97%, more preferably at least 98%, more preferably at least 99%, more preferably at least 99.1%, more preferably at least 99.2%, more preferably at least 99.3%, more preferably at least 99.4%, more preferably at least 99.5%, more preferably at least 99.6%, more preferably at least 99.7%, more preferably at least 99.8%, and even more preferably at least 99.9% identical to SEQ ID NO: 1, 2, 3, 4, 5, 6, 7, 8, 9, 10, 11, 12, 13, 14, 15, 16, 17, 18, 19, 20, 21, 22, 23, 24, 25, 26, 27, 28, 29, 30, 31, 32, 33, 34, 35, 36, 37, 38, 39, 40, 41, 42, 43, 44, 45, 46, 47, 48, 49, 50, 51, 52, 53, 54, 55, 56, 57, 58, 59, 60, 61, 62, 63, 64, 65, 66, 67, 68, 69, 70, 71, 72, 73, 74, 75, 76, 77, 78, 79, 80, 81, 82, 83, 84, 85, 86, 87, 88, 89, 90, 91, 92, 93, 94, 95, 96, 97, 98, 99, 100, 101, 102, 103, 104, 105, 106, 107, 108, 109, 110, 111, 112, 113, 114, 115, 116, 117, 265, 266, 267, 268, 269, 270, 271, 272, 273, 274, 275, 276, 277, 278, 279, 280, 281, 282, 283, 284, 285, 286, 287, 288, 289, 290, 291, 292, 293, 294, 295, 296, 297, 298, 299, 300, 301, 302, 303, 304, 305, 306, 307, 308, 309, 310, 311, 312, 313, 314, 315, 316, 317, 318, 319, 320, 321, 322, 323, 324, 325, 326, 327328, 329, 330, 331, 332, 333, 334, 335, 336, 337, 338, 339, 340, 341, 342, 343, 344, 345, 346, 347, 348, 349, 350, 351, 352, 353, 354, 355, 356, 357, 358, 359, 360, 361, 362, 363, 364, 365, 366, 367, 368, 369, 370, 371, 372, 373, 374, 375, 376, 377, 378, 379, 380, 381, 382, 383, 384, 385, 386, 387, 388, 389, 390, 391, 392, 393, 394, 395, 396, 397, 398, 399, 400, 401, 402, 403, 404, 405, 406, 407, 408, 409, 410, 411, 412, 413, 414, 415, 416, 417, 418, 419, 420, 421, 422, 423, 424, 425, 426, 427, 428, 429, 430, 431, 432, 433, 434, 435, 436, 437, 438, 439, 440, 441, 442, 443, 444, 445, 446, 447, 448, 449, 450, 451, 452, 453, 454, 455, 456, 457, 458, 459, 460, 461, 462, 463, 464, 465, 466, 467, 468, 469, 470, 471, 472, 473, 474, 475, 476, 477, 478, 479, 480, 481, 482, 483, 484, 485, 486, 487, 488, 489, 490, 491, 492, 493, 494, 495, 496, 497, 498, 499, 500, 501, 502, 503, 504, 505, 506, 507, 508, 509, 510, 511, 512, 513, 514, 515, 516, 517, 518, 519, 520, 521, 522, 523, 524, 525, 526, 527, 528, 529, 530, 531, 532, 533, 534, 535, 536, 537, 538, 539, 540, 541, 542, 543, 544, 545, 546, 547, 548, 549, 550, 551, 552, 553, 554, 555, 556, 557, 558, 559, 560, 561, 562, 563, 564, 565, 577, 579, 581, 583, 585, 587, 589, 591, 593, 595, 597, 599, 601, 603, 605, 607, 609, 611, 613, 615, 617, 619, 621, 623, 625, 627, 637, 651; 652; 653; 654; 655; 656; 657; 658; 659; 660; 661; 662; 663; 664; 665; 666; 667; 668; 669; 670; 671, 714; 715; 716; 717; 718; 719; 720; 721; 722; 723; 724; 725; 726; 727; 728; 729; 730; 731; 732; 733; 734; 735; 736; 737; 738, 795, 882, 883, 884, 885, 886, 887, 888, 889, 890, 891, 892, 893, 894, 895, 896, 897, 898, 899, 900, 901, 902, 903, 904, 905, 906, 907, 908, 909, 910, 911, 912, 913, 914, 915, 916, 917, 918, 919, 920, 921, 922, 923, 924, 925, 926, 927, 928, 929, 930, 931, 932, 933, 934, 935, 936, 937, 938, 939, 940, 941, 942, 943, 944, 945, 946, 947, 948, 949, 950, 951, 952, 953, 954, 955, 956, 957, 958, 959, 960, or a variant, a derivative, a homologue, an orthologue, or paralogue thereof.

[0740] By “variant” polypeptide is intended a polypeptide derived from the protein of SEQ ID NO: 1, 2, 3, 4, 5, 6, 7, 8, 9, 10, 11, 12, 13, 14, 15, 16, 17, 18, 19, 20, 21, 22, 23, 24, 25, 26, 27, 28, 29, 30, 31, 32, 33, 34, 35, 36, 37, 38, 39, 40, 41, 42, 43, 44, 45, 46, 47, 48, 49, 50, 51, 52, 53, 54, 55, 56, 57, 58, 59, 60, 61, 62, 63, 64, 65, 66, 67, 68, 69, 70, 71, 72, 73, 74, 75, 76, 77, 78, 79, 80, 81, 82, 83, 84, 85, 86, 87, 88, 89, 90, 91, 92, 93, 94, 95, 96, 97, 98, 99, 100, 101, 102, 103, 104, 105, 106, 107, 108, 109, 110, 111, 112, 113, 114, 115, 116, 117, 265, 266, 267, 268, 269, 270, 271, 272, 273, 274, 275, 276, 277, 278, 279, 280, 281, 282, 283, 284, 285, 286, 287, 288, 289, 290, 291, 292, 293, 294, 295, 296, 297, 298, 299, 300, 301, 302, 303, 304, 305, 306, 307, 308, 309, 310, 311, 312, 313, 314, 315, 316, 317, 318, 319, 320, 321, 322, 323, 324, 325, 326, 327328, 329, 330, 331, 332, 333, 334, 335, 336, 337, 338, 339, 340, 341, 342, 343, 344, 345, 346, 347, 348, 349, 350, 351, 352, 353, 354, 355, 356, 357, 358, 359, 360, 361, 362, 363, 364, 365, 366, 367, 368, 369, 370, 371, 372, 373, 374, 375, 376, 377, 378, 379, 380, 381, 382, 383, 384, 385, 386, 387, 388, 389, 390, 391, 392, 393, 394, 395, 396, 397, 398, 399, 400, 401, 402, 403, 404, 405, 406, 407, 408, 409, 410, 411, 412, 413, 414, 415, 416, 417, 418, 419, 420, 421, 422, 423, 424, 425, 426, 427, 428, 429, 430, 431, 432, 433, 434, 435, 436, 437, 438, 439, 440, 441, 442, 443, 444, 445, 446, 447, 448, 449, 450, 451, 452, 453, 454, 455, 456, 457, 458, 459, 460, 461, 462, 463, 464, 465, 466, 467, 468, 469, 470, 471, 472, 473, 474, 475, 476, 477, 478, 479, 480, 481, 482, 483, 484, 485, 486, 487, 488, 489, 490, 491, 492, 493, 494, 495, 496, 497, 498, 499, 500, 501, 502, 503, 504, 505, 506, 507, 508, 509, 510, 511, 512, 513, 514, 515, 516, 517, 518, 519, 520, 521, 522, 523, 524, 525, 526, 527, 528, 529, 530, 531, 532, 533, 534, 535, 536, 537, 538, 539, 540, 541, 542, 543, 544, 545, 546, 547, 548, 549, 550, 551, 552, 553, 554, 555, 556, 557, 558, 559, 560, 561, 562, 563, 564, 565, 577, 579, 581, 583, 585, 587, 589, 591, 593, 595, 597, 599, 601,603, 605, 607, 609, 611,613, 615, 617, 619, 621,623, 625, 627, 637, 651; 652; 653; 654; 655; 656; 657; 658; 659; 660; 661; 662; 663; 664; 665; 666; 667; 668; 669; 670; 671, 714; 715; 716; 717; 718; 719; 720; 721; 722; 723; 724; 725; 726; 727; 728; 729; 730; 731; 732; 733; 734; 735; 736; 737; 738, 795, 882, 883, 884, 885, 886, 887, 888, 889, 890, 891, 892, 893, 894, 895, 896, 897, 898, 899, 900, 901, 902, 903, 904, 905, 906, 907, 908, 909, 910, 911, 912, 913, 914, 915, 916, 917, 918, 919, 920, 921, 922, 923, 924, 925, 926, 927, 928, 929, 930, 931, 932, 933, 934, 935, 936, 937, 938, 939, 940, 941, 942, 943, 944, 945, 946, 947, 948, 949, 950, 951, 952, 953, 954, 955, 956, 957, 958, 959, 960, or a variant, a derivative, a homologue, an orthologue, or paralogue thereof, by deletion (so-called truncation) or addition of one or more amino acids to the N-terminal and/or C-terminal end of the native protein; deletion or addition of one or more amino acids at one or more sites in the native protein; or substitution of one or more amino acids at one or more sites in the native protein. Such variants may result from, for example, genetic polymorphism or from human manipulation. Methods for such manipulations are generally known in the art.

[0741] “Derivatives” of a protein encompass peptides, oligopeptides, polypeptides, proteins and enzymes having amino acid substitutions, deletions and/or insertions relative to the unmodified protein in question and having similar biological and functional activity as the unmodified protein from which they are derived.

[0742] “Homologues” of a protein encompass peptides, oligopeptides, polypeptides, proteins and enzymes having amino acid substitutions, deletions and/or insertions relative to the unmodified protein in question and having similar biological and functional activity as the unmodified protein from which they are derived.

[0743] A deletion refers to removal of one or more amino acids from a protein.

[0744] An insertion refers to one or more amino acid residues being introduced into a predetermined site in a protein. Insertions may comprise N-terminal and/or C-terminal fusions as well as intra-sequence insertions of single or multiple amino acids. Generally, insertions within the amino acid sequence will be smaller than N- or C-terminal fusions, of the order of about 1 to 10 residues. Examples of N- or C-terminal fusion proteins or peptides include the binding domain or activation domain of a transcriptional activator as used in the yeast two-hybrid system, phage coat proteins, (histidine)-6-tag, glutathione S-transferase-tag, protein A, maltose-binding protein, dihydrofolate reductase, Tag•100 epitope, c-myc epitope, FLAG®-epitope, lacZ, CMP (calmodulin-binding peptide), HA epitope, protein C epitope and VSV epitope.

[0745] A substitution refers to replacement of amino acids of the protein with other amino acids having similar properties (such as similar hydrophobicity, hydrophilicity, antigenicity, propensity to form or break α-helical structures or β-sheet structures). Amino acid substitutions are typically of single residues, but may be clustered depending upon functional constraints placed upon the polypeptide and may range from 1 to 10 amino acids; insertions will usually be of the order of about 1 to 10 amino acid residues. The amino acid substitutions are preferably conservative amino acid substitutions. Conservative substitution tables are well known in the art (see for example Creighton (1984) Proteins. W.H. Freeman and Company (Eds).

TABLE 1
Examples of conserved amino acid substitutions

| | Conservative |
|---|---|
| Residue | Substitutions |
| Ala | Ser |
| Arg | Lys |
| Asn | Gln; His |
| Asp | Glu |
| Gln | Asn |
| Cys | Ser |
| Glu | Asp |
| Gly | Pro |
| His | Asn; Gln |
| Ile | Leu, Val |
| Leu | Ile; Val |
| Lys | Arg; Gln |
| Met | Leu; Ile |
| Phe | Met; Leu; Tyr |
| Ser | Thr; Gly |
| Thr | Ser; Val |
| Trp | Tyr |
| Tyr | Trp; Phe |
| Val | lle; Leu |

[0746] Amino acid substitutions, deletions and/or insertions may readily be made using peptide synthetic techniques well known in the art, such as solid phase peptide synthesis and the like, or by recombinant DNA manipulation. Methods for the manipulation of DNA sequences to produce substitution, insertion or deletion variants of a protein are well known in the art. For example, techniques for making substitution mutations at predetermined sites in DNA are well known to those skilled in the art and include M13 mutagenesis, T7-Gen in vitro mutagenesis (USB, Cleveland, OH), QuickChange Site Directed mutagenesis (Stratagene, San Diego, CA), PCR-mediated site-directed mutagenesis or other site-directed mutagenesis protocols.

[0747] “Derivatives” further include peptides, oligopeptides, polypeptides which may, compared to the amino acid sequence of the naturally-occurring form of the protein, such as the protein of interest, comprise substitutions of amino acids with non-naturally occurring amino acid residues, or additions of non-naturally occurring amino acid residues. “Derivatives” of a protein also encompass peptides, oligopeptides, polypeptides which comprise naturally occurring altered (glycosylated, acylated, prenylated, phosphorylated, myristoylated, sulphated etc.) or non-naturally altered amino acid residues compared to the amino acid sequence of a naturally-occurring form of the polypeptide. A derivative may also comprise one or more non-amino acid substituents or additions compared to the amino acid sequence from which it is derived, for example a reporter molecule or other ligand, covalently or non-covalently bound to the amino acid sequence, such as a reporter molecule which is bound to facilitate its detection, and non-naturally occurring amino acid residues relative to the amino acid sequence of a naturally-occurring protein. Furthermore, “derivatives” also include fusions of the naturally-occurring form of the protein with tagging peptides such as FLAG, HIS6 or thioredoxin (for a review of tagging peptides, see Terpe, Appl. Microbiol. Biotechnol. 60, 523-533, 2003).

[0748] “Orthologues” and “paralogues” encompass evolutionary concepts used to describe the ancestral relationships of genes. Paralogues are genes within the same species that have originated through duplication of an ancestral gene; orthologues are genes from different organisms that have originated through speciation, and are also derived from a common ancestral gene.

[0749] It is well-known in the art that paralogues and orthologues may share distinct domains harboring suitable amino acid residues at given sites, such as binding pockets for particular substrates or binding motifs for interaction with other proteins.

[0750] The term “domain” refers to a set of amino acids conserved at specific positions along an alignment of sequences of evolutionarily related proteins. While amino acids at other positions can vary between homologues, amino acids that are highly conserved at specific positions indicate amino acids that are likely essential in the structure, stability or function of a protein. Identified by their high degree of conservation in aligned sequences of a family of protein homologues, they can be used as identifiers to determine if any polypeptide in question belongs to a previously identified polypeptide family.

[0751] The term “motif” or “consensus sequence” refers to a short conserved region in the sequence of evolutionarily related proteins. Motifs are frequently highly conserved parts of domains, but may also include only part of the domain, or be located outside of conserved domain (if all of the amino acids of the motif fall outside of a defined domain). Preferred motifs which are contained in the sequences of the PPO polypeptides according to the present invention are SQ[N/K/H]KRYI, TLGTLFSS, [F/Y]TTF[V/I]GG.

[0752] Specialist databases exist for the identification of domains, for example, SMART (Schultz et al. (1998) Proc. Natl. Acad. Sci. USA 95, 5857-5864; Letunic et al. (2002) Nucleic Acids Res 30, 242-244), InterPro (Mulder et al., (2003) Nucl. Acids. Res. 31, 315-318), Prosite (Bucher and Bairoch (1994), A generalized profile syntax for biomolecular sequences motifs and its function in automatic sequence interpretation. (In) ISMB-94; Proceedings 2nd International Conference on Intelligent Systems for Molecular Biology. Altman R., Brutlag D., Karp P., Lathrop R., Searls D., Eds., pp 53-61, AAAI Press, Menlo Park; Hulo et al., Nucl. Acids. Res. 32:D134-D137, (2004)), or Pfam (Bateman et al., Nucleic Acids Research 30(1): 276-280 (2002)). A set of tools for in silico analysis of protein sequences is available on the ExPASy proteomics server (Swiss Institute of Bioinformatics (Gasteiger et al., ExPASy: the proteomics server for in-depth protein knowledge and analysis, Nucleic Acids Res. 31:3784-3788(2003)). Domains or motifs may also be identified using routine techniques, such as by sequence alignment.

[0753] Methods for the alignment of sequences for comparison are well known in the art, such methods include GAP, BESTFIT, BLAST, FASTA and TFASTA. GAP uses the algorithm of Needleman and Wunsch ((1970) J Mol Biol 48: 443-453) to find the global (i.e. spanning the complete sequences) alignment of two sequences that maximizes the number of matches and minimizes the number of gaps. The BLAST algorithm (Altschul et al. (1990) J Mol Biol 215: 403-10) calculates percent sequence identity and performs a statistical analysis of the similarity between the two sequences. The software for performing BLAST analysis is publicly available through the National Centre for Biotechnology Information (NCBI). Homologues may readily be identified using, for example, the ClustalW multiple sequence alignment algorithm (version 1.83), with the default pairwise alignment parameters, and a scoring method in percentage. Global percentages of similarity and identity may also be determined using one of the methods available in the MatGAT software package (Campanella et al., BMC Bioinformatics. 2003 Jul. 10; 4:29. MatGAT: an application that generates similarity/identity matrices using protein or DNA sequences.). Minor manual editing may be performed to optimise alignment between conserved motifs, as would be apparent to a person skilled in the art. Furthermore, instead of using full-length sequences for the identification of homologues, specific domains may also be used. The sequence identity values may be determined over the entire nucleic acid or amino acid sequence or over selected domains or conserved motif(s), using the programs mentioned above using the default parameters. For local alignments, the Smith-Waterman algorithm is particularly useful (Smith T F, Waterman M S (1981) J. Mol. Biol 147(1); 195-7).

[0754] The inventors of the present invention have found that by substituting one or more of the key amino acid residues, employing e.g. one of the above described methods to mutate the encoding nucleic acids, the phenyluracil herbicide tolerance or resistance could be remarkably increased as compared to the activity of the wild type PPO enzymes with SEQ ID NO: 1, 2, 3, 4, 5, 6, 7, 8, 9, 10, 11, 12, 13, 14, 15, 16, 17, 18, 19, 20, 21, 22, 23, 24, 25, 26, 27, 28, 29, 30, 31, 32, 33, 34, 35, 36, 37, 38, 39, 40, 41, 42, 43, 44, 45, 46, 47, 48, 49, 50, 51, 52, 53, 54, 55, 56, 57, 58, 59, 60, 61, 62, 63, 64, 65, 66, 67, 68, 69, 70, 71, 72, 73, 74, 75, 76, 77, 78, 79, 80, 81, 82, 83, 84, 85, 86, 87, 88, 89, 90, 91, 92, 93, 94, 95, 96, 97, 98, 99, 100, 101, 102, 103, 104, 105, 106, 107, 108, 109, 110, 111, 112, 113, 114, 115, 116, 117, 577, 579, 581, 583, 585, 587, 589, 591, 593, 595, 597, 599, 601, 603, 605, 607, 609, 611, 613, 615, 617, 619, 621, 623, 625, 627, or 637. Preferred substitutions of mutated PPO are those that increase the herbicide tolerance of the plant, but leave the biological activity of the oxidase activity substantially unaffected.

[0755] Accordingly, in another object of the present invention the key amino acid residues of a PPO enzyme comprising SEQ ID NO: 1, 2, 3, 4, 5, 6, 7, 8, 9, 10, 11, 12, 13, 14, 15, 16, 17, 18, 19, 20, 21, 22, 23, 24, 25, 26, 27, 28, 29, 30, 31, 32, 33, 34, 35, 36, 37, 38, 39, 40, 41, 42, 43, 44, 45, 46, 47, 48, 49, 50, 51, 52, 53, 54, 55, 56, 57, 58, 59, 60, 61, 62, 63, 64, 65, 66, 67, 68, 69, 70, 71, 72, 73, 74, 75, 76, 77, 78, 79, 80, 81, 82, 83, 84, 85, 86, 87, 88, 89, 90, 91, 92, 93, 94, 95, 96, 97, 98, 99, 100, 101, 102, 103, 104, 105, 106, 107, 108, 109, 110, 111, 112, 113, 114, 115, 116, 117, 577, 579, 581, 583, 585, 587, 589, 591, 593, 595, 597, 599, 601, 603, 605, 607, 609, 611, 613, 615, 617, 619, 621, 623, 625, 627, or 637, a variant, derivative, orthologue, paralogue or homologue thereof, is substituted by any other amino acid.

[0756] In one embodiment, the key amino acid residues of a PPO enzyme, a variant, derivative, orthologue, paralogue or homologue thereof, is substituted by a conserved amino acid as depicted in Table 1.

[0757] It will be understood by the person skilled in the art that amino acids located in a close proximity to the positions of amino acids mentioned below may also be substituted. Thus, in another embodiment the variant of SEQ ID NO: 1, 2, 3, 4, 5, 6, 7, 8, 9, 10, 11, 12, 13, 14, 15, 16, 17, 18, 19, 20, 21, 22, 23, 24, 25, 26, 27, 28, 29, 30, 31, 32, 33, 34, 35, 36, 37, 38, 39, 40, 41, 42, 43, 44, 45, 46, 47, 48, 49, 50, 51, 52, 53, 54, 55, 56, 57, 58, 59, 60, 61, 62, 63, 64, 65, 66, 67, 68, 69, 70, 71, 72, 73, 74, 75, 76, 77, 78, 79, 80, 81, 82, 83, 84, 85, 86, 87, 88, 89, 90, 91, 92, 93, 94, 95, 96, 97, 98, 99, 100, 101, 102, 103, 104, 105, 106, 107,108, 109, 110, 111, 112, 113, 114, 115, 116, 117, 577, 579, 581, 583, 585, 587, 589, 591, 593, 595, 597, 599, 601, 603, 605, 607, 609, 611, 613, 615, 617, 619, 621, 623, 625, 627, or 637, a variant, derivative, orthologue, paralogue or homologue thereof comprises a mutated PPO, wherein an amino acid ±3, ±2 or ±1 amino acid positions from a key amino acid is substituted by any other amino acid.

[0758] Based on techniques well-known in the art, a highly characteristic sequence pattern can be developed, by means of which further of mutated PPO candidates with the desired activity may be searched.

[0759] Searching for further mutated PPO candidates by applying a suitable sequence pattern would also be encompassed by the present invention. It will be understood by a skilled reader that the present sequence pattern is not limited by the exact distances between two adjacent amino acid residues of said pattern. Each of the distances between two neighbours in the above patterns may, for example, vary independently of each other by up to ±10, ±5, ±3, ±2 or ±1 amino acid positions without substantially affecting the desired activity.

[0760] Furthermore, by applying the method of site directed mutagenesis, in particular saturation mutagenes (see e.g. Schenk et al., Biospektrum March 2006, pages 277-279), the inventors of the present invention have identified and generated specific amino acid substitutions and combinations thereof, which—when introduced into a plant by transforming and expressing the respective mutated PPO encoding nucleic acid—confer increased herbicide resistance or tolerance to a phenyluracil herbicide to said plant.

[0761] Thus, in a particularly preferred embodiment, the variant or derivative of the mutated PPO refers to a polypeptide comprising SEQ ID NO: 1, 2, 3, 4, 5, 6, 7, 8, 9, 10, 11, 12, 13, 14, 15, 16, 17, 18, 19, 20, 21, 22, 23, 24, 25, 26, 27, 28, 29, 30, 31, 32, 33, 34, 35, 36, 37, 38, 39, 40, 41, 42, 43, 44, 45, 46, 47, 48, 49, 50, 51, 52, 53, 54, 55, 56, 57, 58, 59, 60, 61, 62, 63, 64, 65, 66, 67, 68, 69, 70, 71, 72, 73, 74, 75, 76, 77, 78, 79, 80, 81, 82, 83, 84, 85, 86, 87, 88, 89, 90, 91, 92, 93, 94, 95, 96, 97, 98, 99, 100, 101, 102, 103, 104, 105, 106, 107, 108, 109, 110, 111, 112, 113, 114, 115, 116, 117, or 637, comprising a single amino acid substitution at positions depicted in the following Table 2a.

TABLE 2a-1
Single amino acid substitutions within SEQ ID NO: 1, 2, 3, 4, 5, 6, 7, 8, 9, 10, 11,
12, 13, 14, 15, 16, 17, 18, 19, 20, 21, 22, 23, 24, 25, 26, 27, 28, 29, 30, 31, 32, 33,
34, 35, 36, 37, 38, 39, 40, 41, 42, 43, 44, 45, 46, 47, 48, 49, 50, 51, 52, 53, 54, 55,
56, 57, 58, 59, 60, 61, 62, 63, 64, 65, 66, 67, 68, 69, 70, 71, 72, 73, 74, 75, 76, 77,
78, 79, 80, 81, 82, 83, 84, 85, 86, 87, 88, 89, 90, 91, 92, 93, 94, 95, 96, 97, 98, 99,
100, 101, 102, 103, 104, 105, 106, 107, 108, 109, 110, 111, 112, 113, 114, 115,
116, 117, or 637

| SEQ | | Mutated | Mutated | Mutated | Mutated | Mutated site |
|---|---|---|---|---|---|---|
| ID | Organism | site 1 | site 2 | site 3 | site 4 | 5 |
| 1 | Amaranthus tuberculatus | R128 | G210 | G211 | L397 | F420 |
| 2 | Amaranthus tuberculatus | R128 | G210 | G211 | L397 | F420 |
| 3 | Amaranthus tuberculatus | R128 | G210 | — | L396 | F419 |
| 4 | Amaranthus tuberculatus | R128 | G210 | — | L396 | F419 |
| 5 | Amaranthus | R128 | G210 | G211 | L398 | F421 |
| | hypochondriacus | | | | | |
| 6 | Amaranthus tuberculatus | R98 | G180 | G181 | L368 | F391 |
| 7 | Spinacia oleracea | R127 | G209 | G210 | L397 | F420 |
| 8 | Vitis vinifera | R100 | G182 | G183 | L373 | F396 |
| 9 | Ricinus communis | R99 | A181 | G182 | L372 | F395 |
| 10 | Theobroma cacao | R98 | A180 | G181 | L370 | F393 |
| 11 | Glycine max | R98 | A180 | A181 | L367 | F390 |
| 12 | Prunus persica | R96 | A175 | G176 | L366 | F389 |
| 13 | Medicago truncatula | R98 | A180 | A181 | L367 | F390 |
| 14 | Fragaria vesca subsp. | R98 | A177 | G178 | L368 | F391 |
| | vesca | | | | | |
| 15 | Citrus clementina | R98 | A180 | A181 | L370 | F393 |
| 16 | Citrus clementina | R98 | A180 | A181 | L370 | F393 |
| 17 | Cicer arietinum | R98 | A180 | A181 | L367 | F390 |
| 18 | Cucumis sativus | R98 | A180 | G181 | L368 | F391 |
| 19 | Cucumis sativus | R93 | A175 | G176 | L363 | F386 |
| 20 | Nicotiana tabacum | R98 | G178 | G179 | L369 | F392 |
| 21 | Solanum lycopersicum | R95 | G175 | G176 | L366 | F389 |
| 22 | Arabidopsis thaliana | R101 | A182 | A183 | L371 | F394 |
| 23 | Arabidopsis lyrata subsp. | R103 | A186 | A187 | L375 | F398 |
| | lyrata | | | | | |
| 24 | Arabidopsis thaliana | R101 | A182 | A183 | L364 | F387 |
| 25 | Arabidopsis thaliana | R147 | A228 | A229 | L410 | F433 |
| 26 | Ambrosia artemisiifolia | R74 | G151 | G152 | L336 | F359 |
| 27 | Setaria italica | R128 | A213 | G214 | L408 | F431 |
| 28 | Sorghum bicolor | R130 | A215 | G216 | L410 | F433 |
| 29 | Arabidopsis thaliana | R101 | A152 | A153 | L341 | F364 |
| 30 | Zea mays | R130 | A215 | G216 | L410 | F433 |
| 31 | Zea mays | R130 | A215 | G216 | L410 | F433 |
| 32 | LEMPA | R105 | G188 | G189 | L381 | F404 |
| 33 | LEMPA | R150 | A226 | G227 | L409 | Y432 |
| 34 | Populus trichocarpa | R100 | A182 | G183 | L373 | F396 |
| 35 | Capsella rubella | R165 | A248 | A249 | L433 | F456 |
| 36 | Brachypodium distachyon | R134 | A219 | G220 | L414 | F437 |
| 37 | Oryza sativa Japonica | R95 | G179 | G180 | L374 | F397 |
| | Group | | | | | |
| 38 | Picea sitchensis | R100 | G186 | A187 | L354 | F377 |
| 39 | Solanum tuberosum | R98 | G178 | G179 | L369 | F392 |
| 40 | Oryza sativa Indica Group | R139 | G224 | G225 | L419 | F442 |
| 41 | Oryza sativa Japonica | R139 | G224 | G225 | L419 | F442 |
| | Group | | | | | |
| 42 | Eutrema salsugineum | R96 | A179 | A180 | L368 | F391 |
| 43 | Selaginella moellendorffii | R97 | G175 | S176 | L377 | F400 |
| 44 | Selaginella moellendorffii | R97 | G175 | S176 | L377 | F400 |
| 45 | Amaranthus tuberculatus | R128 | G210 | G211 | — | — |
| 46 | Amaranthus tuberculatus | R128 | G210 | — | — | — |
| 47 | Zea mays | — | A67 | G68 | L262 | F285 |
| 48 | Aegilops tauschii | R30 | A96 | G97 | L291 | F314 |
| 49 | Genlisea aurea | R89 | G168 | G169 | — | — |
| 50 | Amborella trichopoda | — | — | — | L161 | F184 |
| 51 | Rhodothermus marinus | R87 | A162 | G163 | L330 | F353 |
| 52 | Salinibacter ruber | R87 | A161 | G162 | L330 | F353 |
| 53 | Salinibacter ruber M8 | R87 | A161 | G162 | L330 | F353 |
| 54 | Zea mays | — | — | — | L69 | F92 |
| 55 | Rhodothermus marinus | R87 | A162 | G163 | L330 | F353 |
| 56 | Caldithrix abyssi | R86 | A160 | G161 | L329 | F352 |
| 57 | Opitutus terrae PB90-1 | R103 | A178 | G179 | L345 | M368 |
| 58 | Verrucomicrobia | R91 | A166 | G167 | L332 | Y355 |
| | bacterium | | | | | |
| 59 | Ignavibacterium album | R88 | A163 | G164 | L332 | F355 |
| 60 | Coraliomargarita sp. | R88 | G163 | A164 | L331 | Y354 |
| | CAG: 312 | | | | | |
| 61 | Salisaeta longa | R88 | A163 | G164 | L329 | F352 |
| 62 | Ambrosia artemisiifolia | R98 | G175 | G176 | — | — |
| 63 | Melioribacter roseus P3M- | R88 | A163 | G164 | L333 | F356 |
| | 2 | | | | | |
| 64 | Halothiobacillus | R97 | A170 | G171 | L343 | F366 |
| | neapolitanus c2 | | | | | |
| 65 | Chondrus crispus | Y98 | S176 | G177 | L352 | Y376 |
| 66 | Rubritalea marina | R88 | A163 | G164 | L339 | M362 |
| 67 | Acidobacteria bacterium | R88 | A161 | G162 | L330 | F353 |
| 68 | Coraliomargarita | R88 | A163 | G164 | L323 | F346 |
| | akajimensis DSM 45221 | | | | | |
| 69 | Oscillochloris trichoides | R90 | S164 | G165 | L340 | L363 |
| | DG6 | | | | | |
| 70 | Opitutaceae bacterium | R86 | A161 | G162 | L352 | L375 |
| | TAV1 | | | | | |
| 71 | Amborella trichopoda | R87 | A173 | A174 | L230 | — |
| 72 | Opitutaceae bacterium | R105 | A180 | G181 | L368 | L391 |
| | TAV5 | | | | | |
| 73 | Chloroflexus sp. Y-400-fl | R91 | A166 | G167 | L335 | L358 |
| 74 | Leptospirillum sp. Group II | R92 | A167 | S168 | L335 | F358 |
| | ‘5-way CG’ | | | | | |
| 75 | Leptospirillum ferriphilum | R92 | A167 | S168 | L335 | F358 |
| | ML-04 | | | | | |
| 76 | Verrucomicrobia | R89 | A165 | A166 | L334 | Y357 |
| | bacterium SCGC AAA300- | | | | | |
| | O17 | | | | | |
| 77 | Chloroflexus aggregans | R92 | A167 | G168 | L336 | L359 |
| | DSM 9485 | | | | | |
| 78 | Desulfurobacterium | R86 | A161 | G162 | L333 | M356 |
| | thermolithotrophum | | | | | |
| 79 | Desulfurobacterium sp. | R90 | A165 | G166 | L332 | M355 |
| | TC5-1 | | | | | |
| 80 | Arthrospira platensis C1 | R93 | A176 | G177 | L352 | Y375 |
| 81 | Leptospirillum sp. Group II | R92 | A167 | S168 | L335 | F358 |
| | ‘C75’ | | | | | |
| 82 | Verrucomicrobiae | R87 | A164 | G165 | L332 | M355 |
| | bacterium DG1235 | | | | | |
| 83 | Verrucomicrobia | R89 | A165 | A166 | L334 | F357 |
| | bacterium SCGC AAA300- | | | | | |
| | K03 | | | | | |
| 84 | Synechococcus sp. JA-3- | R101 | A177 | G178 | L350 | F373 |
| | 3Ab | | | | | |
| 85 | Hymenobacter | R86 | A161 | G162 | A321 | F344 |
| | norwichensis | | | | | |
| 86 | Pontibacter sp. BAB1700 | R85 | G159 | G160 | S319 | Y342 |
| 87 | Leptospirillum | R92 | A172 | S173 | L339 | F362 |
| | ferrodiazotrophum | | | | | |
| 88 | Prevotella histicola F0411 | C89 | A164 | G165 | L328 | F351 |
| 89 | Flexithrix dorotheae | R84 | A158 | G159 | A313 | F336 |
| 90 | Geobacter | R93 | A168 | G169 | L342 | M365 |
| | metallireducens GS-15 | | | | | |
| 91 | Synechococcus sp. JA-2- | R93 | A169 | G170 | L362 | F385 |
| | 3B′a(2-13) | | | | | |
| 92 | Crinalium epipsammum | R85 | A168 | G169 | L344 | F367 |
| | PCC 9333 | | | | | |
| 93 | Planctomyces maris | A99 | T187 | S188 | F358 | F381 |
| 94 | Geobacter uraniireducens | R93 | A170 | G171 | L344 | M367 |
| | Rf4 | | | | | |
| 95 | Acidithiobacillus | R87 | A162 | G163 | L323 | F346 |
| | ferrivorans | | | | | |
| 96 | Prevotella melaninogenica | C88 | A163 | G164 | L327 | F350 |
| 97 | Thermovibrio | R86 | A160 | G161 | L333 | M356 |
| | ammonificans | | | | | |
| 98 | Brassica_rapa | R143 | A219 | G220 | L402 | Y425 |
| 99 | Brassica_rapa | R112 | A195 | A196 | L384 | F407 |
| 100 | Gossypium | R146 | A222 | G223 | L405 | Y428 |
| 101 | Gossypium | R98 | A180 | G181 | L370 | F393 |
| 102 | Conyza_canadensis | R142 | A218 | G219 | L401 | Y424 |
| 103 | Conyza_canadensis | R102 | G179 | G180 | L365 | F388 |
| 104 | Kochia_scobaria | R172 | A248 | G249 | L431 | F454 |
| 105 | Lolium_rigidum | R138 | A214 | G215 | L397 | Y420 |
| 106 | Lolium_rigidum | R97 | A182 | G183 | L377 | F400 |
| 107 | Gossypium hirsutum | R146 | A222 | G223 | L405 | Y428 |
| | PPO1 | | | | | |
| 108 | Beta vulgaris PPO1 | R167 | A243 | G244 | L426 | Y449 |
| 109 | Hordeum vulgare PPO1 | R137 | A213 | G214 | L396 | Y419 |
| 110 | Hordeum vulgare PPO2 | R142 | A227 | G228 | L422 | F445 |
| 111 | Triticum aestivum PPO1 | R138 | A214 | G215 | L397 | Y420 |
| 112 | Solanum lycopersicum | R95 | G175 | G176 | L366 | F389 |
| | PPO2 | | | | | |
| 113 | Triticum aestivum | R153 | A229 | G230 | L412 | Y435 |
| | PPO1_v2 | | | | | |
| 114 | Gossypium hirsutum | R146 | A222 | G223 | L405 | Y428 |
| | PPO1_v2 | | | | | |
| 115 | Gossypium hirsutum | R98 | A180 | G181 | L370 | F393 |
| | PPO2 | | | | | |
| 116 | Beta vulgaris PPO1_v2 | R167 | A243 | G244 | L426 | Y449 |
| 117 | Brassica napus_PPO2 | R99 | A182 | A183 | L371 | F394 |
| 637 | Oryza sativa_PPO2 | R139 | | G225 | L419 | F442 |

TABLE 2a-2
Additional single amino acid substitutions
within reference to SEQ ID NO: 1, or 637

| SEQ | | Mutated | Mutated |
|---|---|---|---|
| ID | Organism | site 6 | site 7 |
| 1 | Amaranthus tuberculatus | G398 | L400 |
| 637 | Oryza sativa_PPO2 | G420 | L422 |

[0762] In a further particularly preferred embodiment, the variant or derivative of the mutated PPO refers to SEQ ID NO: 1, 2, 3, 4, 5, 6, 7, 8, 9, 10, 11, 12, 13, 14, 15, 16, 17, 18, 19, 20, 21, 22, 23, 24, 25, 26, 27, 28, 29, 30, 31, 32, 33, 34, 35, 36, 37, 38, 39, 40, 41, 42, 43, 44, 45, 46, 47, 48, 49, 50, 51, 52, 53, 54, 55, 56, 57, 58, 59, 60, 61, 62, 63, 64, 65, 66, 67, 68, 69, 70, 71, 72, 73, 74, 75, 76, 77, 78, 79, 80, 81, 82, 83, 84, 85, 86, 87, 88, 89, 90, 91, 92, 93, 94, 95, 96, 97, 98, 99, 100, 101, 102, 103, 104, 105, 106, 107, 108, 109, 110, 111, 112, 113, 114, 115, 116, 117, or 637, comprising a single amino acid substitutions at the positions depicted in the following Table 2b.

[0763] It should be noted that Mutated site 1 of Table 2a) corresponds to Pos 1 of Table 2b); Mutated site 2 of Table 2a) corresponds to Pos 16 of Table 2b); Mutated site 3 of Table 2a) corresponds to Pos 17 of Table 2b); Mutated site 4 of Table 2a) corresponds to Pos 38 of Table 2b); Mutated site 5 of Table 2a) corresponds to Pos 42 of Table 2b).

TABLE 2b

| | | | | | | | | | | Pos | Pos | Pos | Pos | Pos | Pos | Pos | Pos |
|---|---|---|---|---|---|---|---|---|---|---|---|---|---|---|---|---|---|
| ID | Pos 1 | Pos 2 | Pos 3 | Pos 4 | Pos 5 | Pos 6 | Pos 7 | Pos 8 | Pos 9 | 10 | 11 | 12 | 13 | 14 | 15 | 16 | 17 |
| 1 | R128 | Y129 | A131 | S149 | I151 | A154 | P164 | K169 | E182 | S183 | E189 | F196 | D202 | C209 | G210 | G211 | L216 |
| 2 | R128 | Y129 | A131 | S149 | I151 | A154 | P164 | K169 | E182 | S183 | E189 | F196 | D202 | C209 | G210 | G211 | L216 |
| 3 | R128 | Y129 | A131 | S149 | I151 | A154 | P164 | K169 | E182 | S183 | E189 | F196 | D202 | C209 | G210 | — | L215 |
| 4 | R128 | Y129 | A131 | S149 | I151 | A154 | P164 | K169 | E182 | S183 | E189 | F196 | D202 | C209 | G210 | — | L215 |
| 5 | R128 | Y129 | A131 | S149 | I151 | A154 | P164 | K169 | E182 | S183 | E189 | F196 | D202 | C209 | G210 | G211 | L216 |
| 6 | R98 | Y99 | A101 | S119 | I121 | A124 | P134 | K139 | E152 | S153 | E159 | F166 | D172 | C179 | G180 | G181 | L186 |
| 7 | R127 | Y128 | A130 | S148 | I150 | A153 | P163 | K168 | E181 | S182 | E188 | F195 | D201 | S208 | G209 | G210 | L215 |
| 8 | R100 | Y101 | V103 | S121 | I123 | A126 | P136 | K141 | E154 | S155 | Q161 | V168 | D174 | S181 | G182 | G183 | L188 |
| 9 | R99 | Y100 | V102 | S120 | I122 | A125 | P135 | K140 | E153 | S154 | Q160 | V167 | D173 | S180 | A181 | G182 | L187 |
| 10 | R98 | Y99 | V101 | S119 | I121 | A124 | P134 | K139 | E152 | S153 | Q159 | V166 | D172 | S179 | A180 | G181 | L186 |
| 11 | R98 | Y99 | V101 | S119 | L121 | A124 | P134 | R139 | E152 | S153 | E159 | V166 | D172 | S179 | A180 | A181 | L186 |
| 12 | R96 | Y97 | V99 | S117 | F119 | A122 | P132 | D137 | E147 | S148 | Q154 | V161 | D167 | S174 | A175 | G176 | L181 |
| 13 | R98 | Y99 | V101 | S119 | L121 | A124 | P134 | R139 | E152 | S153 | E159 | V166 | D172 | S179 | A180 | A181 | L186 |
| 14 | R98 | Y99 | A101 | S119 | F121 | T124 | P134 | K139 | E149 | S150 | Q156 | V163 | D169 | S176 | A177 | G178 | L183 |
| 15 | R98 | Y99 | V101 | S119 | F121 | A124 | P134 | K139 | E152 | S153 | Q159 | V166 | D172 | S179 | A180 | A181 | L186 |
| 16 | R98 | Y99 | V101 | S119 | F121 | A124 | P134 | K139 | E152 | S153 | Q159 | V166 | D172 | S179 | A180 | A181 | L186 |
| 17 | R98 | Y99 | V101 | S119 | L121 | A124 | P134 | R139 | E152 | S153 | E159 | V166 | D172 | S179 | A180 | A181 | L186 |
| 18 | R98 | Y99 | V101 | S119 | F121 | A124 | P134 | K139 | E152 | S153 | Q159 | V166 | D172 | S179 | A180 | G181 | L186 |
| 19 | R93 | Y94 | V96 | S114 | F116 | A119 | P129 | K134 | E147 | S148 | Q154 | V161 | D167 | S174 | A175 | G176 | L181 |
| 20 | R98 | Y99 | A101 | S119 | F121 | T124 | P134 | N139 | E150 | S151 | Q157 | V164 | D170 | C177 | G178 | G179 | L184 |
| 21 | R95 | Y96 | A98 | S116 | F118 | T121 | P131 | N136 | E147 | S148 | Q154 | V161 | D167 | C174 | G175 | G176 | L181 |
| 22 | R101 | Y102 | V104 | S122 | V/124 | T127 | P137 | K142 | E154 | S155 | Q161 | V168 | D174 | S181 | A182 | A183 | L188 |
| 23 | R103 | Y104 | V106 | S124 | V126 | T129 | P139 | K144 | E158 | S159 | Q165 | V172 | D178 | S185 | A186 | A187 | L192 |
| 24 | R101 | Y102 | V104 | S122 | V124 | T127 | P137 | K142 | E154 | S155 | Q161 | V168 | D174 | S181 | A182 | A183 | L188 |
| 25 | R147 | Y148 | V150 | S168 | V170 | T173 | P183 | K188 | E200 | S201 | Q207 | V214 | D220 | S227 | A228 | A229 | L234 |
| 26 | R74 | Y75 | V77 | S95 | F97 | T100 | P110 | K115 | E123 | S124 | Q130 | V137 | D143 | S150 | G151 | G152 | L157 |
| 27 | R128 | Y129 | V131 | S149 | V151 | T154 | P164 | K169 | E185 | S186 | E192 | V199 | D205 | S212 | A213 | G214 | L219 |
| 28 | R130 | Y131 | V133 | S151 | V153 | T156 | P166 | K171 | E187 | S188 | E194 | V201 | D207 | S214 | A215 | G216 | L221 |
| 29 | R101 | Y102 | V104 | — | — | — | — | — | E124 | S125 | Q131 | V138 | D144 | S151 | A152 | A153 | L158 |
| 30 | R130 | Y131 | V133 | S151 | V153 | T156 | P166 | K171 | E187 | S188 | E194 | V201 | D207 | S214 | A215 | G216 | L221 |
| 31 | R130 | Y131 | V133 | S151 | V153 | T156 | P166 | K171 | E187 | S188 | E194 | V201 | D207 | S214 | A215 | G216 | L221 |
| 32 | R105 | Y106 | V108 | S126 | L128 | T131 | P141 | R146 | E160 | S161 | Q167 | V174 | D180 | S187 | G188 | G189 | L194 |
| 33 | R150 | F151 | L153 | F171 | L173 | I176 | A186 | P191 | E201 | E202 | — | V212 | E218 | Y225 | A226 | G227 | L232 |
| 34 | R100 | Y101 | V103 | S121 | F123 | A126 | P136 | K141 | E154 | S155 | Q161 | V168 | D174 | S181 | A182 | G183 | L188 |
| 35 | R165 | Y166 | V168 | S186 | V188 | T191 | P201 | K206 | E220 | S221 | R227 | V234 | D240 | S247 | A248 | A249 | L254 |
| 36 | R134 | Y135 | V137 | S155 | V157 | T160 | P170 | K175 | E191 | S192 | E198 | V205 | D211 | S218 | A219 | G220 | L225 |
| 37 | R95 | Y96 | V98 | S116 | V118 | T121 | P131 | K136 | E152 | S153 | C158 | V165 | D171 | S178 | G179 | G180 | L185 |
| 38 | R100 | Y101 | V103 | S121 | T123 | A126 | P136 | H141 | E158 | S159 | R165 | V172 | D178 | A185 | G186 | A187 | L192 |
| 39 | R98 | Y99 | A101 | S119 | F121 | T124 | P134 | N139 | E150 | S151 | Q157 | V164 | D170 | C177 | G178 | G179 | L184 |
| 40 | R139 | Y140 | V142 | S160 | V162 | T165 | P175 | K180 | E196 | S197 | C213 | V220 | D229 | S233 | G234 | G235 | L240 |
| 41 | R139 | Y140 | V142 | S160 | V162 | T165 | P175 | K180 | E196 | S197 | C213 | V220 | D229 | S233 | G234 | G235 | L240 |
| 42 | R96 | Y97 | V99 | S117 | V119 | T122 | P132 | K137 | E151 | S152 | Q158 | V165 | D171 | S178 | A179 | A180 | L185 |
| 43 | R97 | Y98 | V100 | T118 | L120 | A123 | P133 | R138 | E147 | S148 | E154 | I161 | D167 | S174 | G175 | S176 | I181 |
| 44 | R97 | Y98 | V100 | T118 | L120 | A123 | P133 | R138 | E147 | S148 | E154 | I161 | D167 | S174 | G175 | S176 | I181 |
| 45 | R128 | Y129 | A131 | S149 | I151 | A154 | P164 | K169 | E182 | S183 | E189 | F196 | D202 | C209 | G210 | G211 | L216 |
| 46 | R128 | Y129 | A131 | S149 | I151 | A154 | P164 | K169 | E182 | S183 | E189 | F196 | D202 | C209 | G210 | — | L215 |
| 47 | — | — | — | S3 | V5 | T8 | P18 | K23 | E39 | S40 | E46 | V53 | D59 | S66 | A67 | G68 | L73 |
| 48 | R30 | Y31 | V33 | — | — | — | P47 | K52 | E68 | S69 | E75 | V82 | D88 | S95 | A96 | G97 | L102 |
| 49 | R89 | Y90 | V92 | S110 | I112 | S115 | P125 | Q130 | E140 | S141 | Q147 | V154 | D160 | S167 | G168 | G169 | L174 |
| 50 | — | — | — | — | — | — | — | — | — | — | — | — | — | — | — | — | — |
| 51 | R87 | F88 | V90 | T108 | L110 | P113 | P123 | H126 | A137 | K138 | — | V148 | E154 | F161 | A162 | G163 | L168 |
| 52 | R87 | Y88 | V90 | T108 | L110 | T113 | P123 | G126 | A136 | R137 | — | V147 | A153 | F160 | A161 | G162 | L167 |
| 53 | R87 | Y88 | V90 | T108 | L110 | T113 | P123 | G126 | A136 | R137 | — | V147 | A153 | F160 | A161 | G162 | L167 |
| 54 | — | — | — | — | — | — | — | — | — | — | — | — | — | — | — | — | — |
| 55 | R87 | F88 | V90 | T108 | L110 | P113 | P123 | H126 | A137 | K138 | — | V148 | E154 | F161 | A162 | G163 | L168 |
| 56 | R86 | Y87 | V89 | T107 | L109 | W112 | P122 | P125 | A135 | D136 | — | F146 | N152 | Y159 | A160 | G161 | L166 |
| 57 | R103 | Y104 | V106 | S124 | L126 | P129 | L139 | R142 | A153 | E154 | — | F164 | N170 | Y177 | A178 | G179 | L184 |
| 58 | R91 | Y92 | I94 | T112 | L114 | L117 | P127 | A130 | A141 | A142 | — | F152 | N158 | Y165 | A166 | G167 | L172 |
| 59 | R88 | Y89 | L91 | T109 | L111 | A114 | P124 | G127 | A138 | E139 | — | F149 | N155 | Y162 | A163 | G164 | L169 |
| 60 | R88 | F89 | A91 | T109 | L111 | F114 | P124 | K127 | A138 | D139 | — | V149 | N155 | Y162 | G163 | A164 | L169 |
| 61 | R88 | F89 | V91 | T109 | L111 | T114 | P124 | A127 | A138 | S139 | — | V149 | D155 | F162 | A163 | G164 | L169 |
| 62 | R98 | Y99 | V101 | S119 | F121 | T124 | P134 | K139 | E147 | S148 | Q154 | V161 | D167 | S174 | G175 | G176 | — |
| 63 | R88 | Y89 | L91 | T109 | L111 | S114 | P124 | S127 | A138 | E139 | — | F149 | D155 | F162 | A163 | G164 | L169 |
| 64 | R9 | F98 | A100 | S118 | L120 | M123 | A133 | K136 | A145 | E146 | — | F156 | D162 | Y169 | A170 | G171 | L176 |
| 65 | Y98 | Y99 | M101 | T119 | L121 | W124 | P134 | L139 | S149 | V150 | Q155 | V162 | D168 | Y175 | S176 | G177 | L182 |
| 66 | R88 | F89 | I91 | S109 | I111 | L114 | P124 | K127 | A138 | D139 | — | P149 | N155 | Y162 | A163 | G164 | L169 |
| 67 | R88 | Y89 | V91 | S109 | L111 | W114 | P124 | G127 | A136 | D137 | — | F147 | N153 | Y160 | A161 | G162 | L167 |
| 68 | R88 | Y89 | V91 | T109 | L111 | I114 | P124 | K127 | A138 | D139 | — | L149 | N155 | Y162 | A163 | G164 | L169 |
| 69 | R90 | Y91 | L93 | M111 | H113 | M116 | P126 | P129 | A139 | S140 | — | V150 | D156 | Y163 | S164 | G165 | M170 |
| 70 | R86 | F87 | V89 | T107 | L109 | L112 | L122 | R125 | G136 | E137 | — | L147 | D153 | Y160 | A161 | G162 | L167 |
| 71 | R87 | F88 | A90 | S108 | L110 | P113 | P123 | S128 | E145 | S146 | Q152 | V159 | D165 | S172 | A173 | A174 | L179 |
| 72 | R105 | F106 | V108 | T126 | L128 | L131 | L141 | R144 | G155 | E156 | — | L166 | D172 | Y179 | A180 | G181 | L186 |
| 73 | R91 | F92 | L94 | T112 | L114 | W117 | P127 | N130 | A141 | A142 | — | A152 | D158 | Y165 | A166 | G167 | L172 |
| 74 | R92 | Y93 | V95 | T113 | L115 | W118 | W128 | P131 | S142 | H143 | — | A153 | D159 | Y166 | A167 | S168 | L173 |
| 75 | R92 | Y93 | V95 | T113 | L115 | W118 | W128 | P131 | S142 | H143 | — | A153 | D159 | Y166 | A167 | S168 | L173 |
| 76 | R89 | F90 | I92 | S110 | F112 | P115 | P125 | G128 | A140 | E141 | — | V151 | N157 | Y164 | A165 | A166 | L171 |
| 77 | R92 | Y93 | L95 | T113 | L115 | W118 | P128 | N131 | A142 | A143 | — | A153 | D159 | Y166 | A167 | G168 | L173 |
| 78 | R86 | F87 | Y89 | S107 | L109 | W112 | F122 | P125 | S136 | E137 | — | A147 | D153 | F160 | A161 | G162 | L167 |
| 79 | R90 | F91 | F93 | S111 | V113 | F116 | Y126 | P129 | S140 | S141 | — | A151 | D157 | F164 | A165 | G166 | L171 |
| 80 | R93 | Y94 | Y96 | S114 | L116 | A119 | A129 | P134 | T151 | Q152 | — | V162 | Q168 | Y175 | A176 | G177 | L182 |
| 81 | R92 | Y93 | V95 | T113 | L115 | W118 | W128 | P131 | S142 | H143 | — | A153 | D159 | Y166 | A167 | S168 | L173 |
| 82 | R87 | Y88 | V90 | T108 | L110 | L113 | P123 | K126 | A139 | S140 | — | F150 | D156 | Y163 | A164 | G165 | L170 |
| 83 | R89 | F90 | I92 | S110 | F112 | P115 | P125 | G128 | A140 | E141 | — | V151 | N157 | Y164 | A165 | A166 | L171 |
| 84 | R101 | Y102 | Y104 | S122 | L124 | V127 | L137 | P142 | R152 | Q153 | — | V163 | E169 | Y176 | A177 | G178 | L183 |
| 85 | R86 | Y87 | L89 | N107 | F109 | W112 | L122 | A126 | D136 | A137 | — | I147 | N153 | Y160 | A161 | G162 | L167 |
| 86 | R85 | Y86 | L88 | N106 | L108 | N111 | R121 | A126 | S134 | D135 | — | Q145 | A151 | Y158 | G159 | G160 | L165 |
| 87 | R92 | F93 | L95 | T113 | I115 | L118 | P128 | P131 | A147 | D148 | — | F158 | D164 | Y171 | A172 | S173 | L178 |
| 88 | C89 | R90 | I92 | T111 | L113 | L116 | P126 | R129 | G139 | A140 | — | F150 | D156 | Y163 | A164 | G165 | L170 |
| 89 | R84 | Y85 | F87 | N105 | F107 | W110 | L120 | T125 | A133 | D134 | — | I144 | N150 | Y157 | A158 | G159 | L164 |
| 90 | R93 | F94 | Y96 | S114 | L116 | W119 | P129 | S132 | A143 | S144 | — | A154 | S160 | F167 | A168 | G169 | M174 |
| 91 | R93 | Y94 | Y96 | S114 | L116 | V119 | L129 | A134 | R144 | Q145 | — | V155 | E161 | Y168 | A169 | G170 | L175 |
| 92 | R85 | F86 | Y88 | S106 | L108 | L111 | A121 | P126 | A143 | Q144 | — | V154 | A160 | Y167 | A168 | G169 | L174 |
| 93 | A99 | L100 | L102 | T128 | L130 | P133 | Y143 | P146 | A162 | Q163 | — | A173 | Q179 | Y186 | T187 | S188 | L193 |
| 94 | R93 | F94 | Y96 | S114 | L116 | W119 | P129 | A134 | A145 | A146 | — | A156 | A162 | F169 | A170 | G171 | M176 |
| 95 | R87 | Y88 | L90 | G107 | L109 | W112 | P122 | S125 | A137 | D138 | — | A148 | D154 | F161 | A162 | G163 | L168 |
| 96 | C88 | R89 | I91 | T110 | L112 | L115 | P125 | K128 | G138 | S139 | — | F149 | D155 | Y162 | A163 | G164 | L169 |
| 97 | R86 | F87 | Y89 | S107 | L109 | W112 | L122 | P125 | A135 | E136 | — | A146 | D152 | F159 | A160 | G161 | M166 |
| 98 | R143 | F144 | L146 | F164 | L166 | I169 | A179 | P184 | E191 | S192 | R198 | V205 | E211 | Y218 | A219 | G220 | L225 |
| 99 | R112 | Y113 | V115 | S133 | V135 | T138 | P148 | K153 | E167 | S168 | Q174 | V181 | D187 | S194 | A195 | A196 | L201 |
| 100 | R146 | F147 | L149 | F167 | L169 | I172 | A182 | P187 | E194 | S195 | R201 | V208 | E214 | Y221 | A222 | G223 | L228 |
| 101 | R98 | Y99 | V101 | S119 | I121 | A124 | P134 | K139 | E152 | S153 | Q159 | V166 | D172 | S179 | A180 | G181 | L186 |
| 102 | R142 | F143 | L145 | F163 | L165 | L168 | A178 | P183 | E190 | S191 | R197 | V204 | E210 | Y217 | A218 | G219 | L224 |
| 103 | R102 | Y103 | V105 | S123 | L125 | T128 | P138 | K143 | E151 | S152 | Q158 | V165 | N171 | S178 | G179 | G180 | L185 |
| 104 | R172 | F173 | L175 | F193 | L195 | F198 | A208 | P213 | E220 | S221 | R227 | V234 | E240 | Y247 | A248 | G249 | L254 |
| 105 | R138 | F139 | L141 | F159 | L161 | I164 | A174 | P179 | E186 | S187 | R193 | V200 | E206 | Y213 | A214 | G215 | L220 |
| 106 | R97 | Y98 | V100 | S118 | L120 | T123 | P133 | K138 | E154 | S155 | E161 | V168 | D174 | S181 | A182 | G183 | L188 |
| 107 | R146 | F147 | L149 | F167 | L169 | I172 | A182 | P187 | E194 | S195 | R201 | V208 | E214 | Y221 | A222 | G223 | L228 |
| 108 | R167 | F168 | L170 | F188 | L190 | I193 | A203 | P208 | E215 | S216 | R222 | V229 | E235 | Y242 | A243 | G244 | L249 |
| 109 | R137 | F138 | L140 | F158 | L160 | V163 | A173 | P178 | E185 | S186 | R192 | V199 | E205 | Y212 | A213 | G214 | L219 |
| 110 | R142 | Y143 | V145 | S163 | V165 | T168 | P178 | K183 | E199 | S200 | E206 | V213 | D219 | S226 | A227 | G228 | L233 |
| 111 | R138 | F139 | L141 | F159 | L161 | I164 | A174 | P179 | E186 | S187 | R193 | V200 | E206 | Y213 | A214 | G215 | L220 |
| 112 | R95 | Y96 | A98 | S116 | F118 | T121 | P131 | N136 | E147 | S148 | Q154 | V161 | D167 | C174 | G175 | G176 | L181 |
| 113 | R153 | F154 | L156 | F174 | L176 | I179 | A189 | P194 | E201 | S202 | R208 | V215 | E221 | Y228 | A229 | G230 | L235 |
| 114 | R146 | F147 | L149 | F167 | L169 | I172 | A182 | P187 | E194 | S195 | R201 | V208 | E214 | Y221 | A222 | G223 | L228 |
| 115 | R98 | Y99 | M101 | S119 | I121 | A124 | P134 | N139 | E152 | S153 | Q159 | V166 | D172 | S179 | A180 | G181 | L186 |
| 116 | R167 | F168 | L170 | F188 | L190 | I193 | A203 | P208 | E215 | S216 | R222 | V229 | E235 | Y242 | A243 | G244 | L249 |
| 117 | R99 | Y100 | V102 | S120 | V122 | T125 | P135 | N141 | E154 | S155 | Q161 | V168 | D174 | S181 | A182 | A183 | L188 |
| | Pos | Pos | Pos | Pos | Pos | Pos | Pos | Pos | Pos | Pos | Pos | Pos | Pos | Pos | Pos | Pos | Pos |
| ID | 18 | 19 | 20 | 21 | 22 | 23 | 24 | 25 | 26 | 27 | 28 | 29 | 30 | 31 | 32 | 33 | 34 |
| 1 | M218 | H219 | H220 | N227 | S234 | S246 | K259 | P260 | R261 | L295 | Q301 | G308 | S324 | R335 | G346 | F349 | L351 |
| 2 | M218 | H219 | H220 | N227 | S234 | S246 | K259 | P260 | R261 | L295 | Q301 | G308 | S324 | R335 | G346 | F349 | L351 |
| 3 | M217 | H218 | H219 | N226 | S233 | S245 | K258 | P259 | R260 | L294 | Q300 | G307 | S323 | R334 | G345 | F348 | L350 |
| 4 | M217 | Y218 | H219 | N226 | S233 | S245 | K258 | P259 | R260 | L294 | Q300 | G307 | S323 | R334 | G345 | F348 | L350 |
| 5 | V218 | H219 | H220 | N227 | S234 | S246 | K260 | P261 | R262 | L296 | Q302 | G309 | S325 | R336 | G347 | F350 | L352 |
| 6 | M188 | H189 | H190 | N197 | S204 | S216 | K230 | P231 | R232 | L266 | Q272 | G279 | S295 | R306 | G317 | F320 | L322 |
| 7 | M217 | R218 | H219 | N226 | S233 | S245 | K259 | P260 | R261 | L295 | H301 | E308 | P324 | N335 | E346 | F349 | L351 |
| 8 | M190 | H191 | H192 | N199 | S206 | A218 | K232 | K234 | R235 | L269 | H275 | E282 | S300 | C311 | G322 | F325 | L327 |
| 9 | V189 | C190 | H191 | N198 | S205 | T217 | K231 | K233 | Q234 | F268 | P274 | E281 | S299 | C310 | R321 | F324 | L326 |
| 10 | M188 | R189 | H190 | D197 | S204 | A216 | K229 | K231 | P232 | L266 | H272 | E279 | S297 | C308 | G319 | F322 | L324 |
| 11 | M188 | R189 | H190 | N197 | S204 | A216 | K230 | K232 | H233 | L267 | H273 | Q280 | D294 | Y305 | G316 | F319 | L321 |
| 12 | M183 | R184 | H185 | N192 | S199 | A211 | K225 | K227 | R228 | L262 | Q268 | E275 | S293 | C304 | G315 | F318 | L320 |
| 13 | I188 | R189 | H190 | N197 | S204 | G216 | K230 | K232 | H233 | L267 | H273 | Q280 | D294 | G305 | G316 | F319 | L321 |
| 14 | M185 | P186 | H187 | N194 | S201 | S213 | K227 | K229 | R230 | L264 | H270 | E277 | S295 | C306 | G317 | F320 | L322 |
| 15 | M188 | R189 | H190 | N197 | S204 | A216 | K230 | H232 | R233 | L267 | H273 | E280 | S297 | C308 | G319 | F322 | L324 |
| 16 | M188 | R189 | H190 | N197 | S204 | A216 | K230 | H232 | R233 | L267 | H273 | E280 | S297 | C308 | G319 | F322 | L324 |
| 17 | M188 | R189 | H190 | N197 | S204 | G216 | K230 | K232 | H233 | L267 | H273 | E280 | D294 | G305 | G316 | F319 | L321 |
| 18 | M188 | S189 | H190 | N197 | S204 | T216 | K230 | K232 | P233 | L267 | — | Q279 | I295 | C306 | G317 | F320 | L322 |
| 19 | M183 | S184 | H185 | N192 | S199 | T211 | K225 | K227 | P228 | L262 | — | Q274 | I290 | C301 | G312 | F315 | L317 |
| 20 | M186 | H187 | H188 | N195 | S202 | P214 | N228 | K230 | R231 | L265 | C271 | D278 | S296 | C307 | G318 | F321 | L323 |
| 21 | M183 | H184 | L185 | N192 | S199 | P211 | N225 | K227 | R228 | L262 | C268 | D275 | S293 | C304 | G315 | F318 | L320 |
| 22 | M190 | K191 | H192 | N199 | S206 | A218 | T232 | K234 | G235 | L269 | — | E280 | H298 | C309 | G320 | F323 | L325 |
| 23 | M194 | K195 | H196 | N203 | S210 | A222 | T236 | R238 | G239 | L273 | — | E284 | H302 | C313 | G324 | F327 | L329 |
| 24 | M190 | K191 | H192 | N199 | S203 | A215 | T229 | K231 | G232 | L266 | — | E277 | H295 | C302 | G313 | F316 | L318 |
| 25 | M236 | K237 | H238 | N245 | S249 | A261 | T275 | K277 | G278 | L312 | — | E323 | H341 | C348 | G359 | F362 | L364 |
| 26 | M159 | R160 | H161 | D168 | S175 | S187 | N197 | K199 | R200 | L234 | C240 | G246 | S263 | N274 | G285 | F288 | L290 |
| 27 | I221 | R222 | H223 | N230 | S237 | A249 | K263 | R265 | N266 | L300 | F306 | G313 | T334 | S345 | G356 | F359 | L361 |
| 28 | I223 | C224 | H225 | N232 | S239 | A251 | K265 | R267 | N268 | L302 | L308 | G315 | T336 | S347 | G358 | F361 | L363 |
| 29 | M160 | K161 | H162 | N169 | S176 | A188 | T202 | K204 | G205 | L239 | — | E250 | H268 | C279 | G290 | F293 | L295 |
| 30 | I223 | R224 | H225 | N232 | S239 | A251 | K265 | R267 | N268 | L302 | F308 | G315 | T336 | S347 | G358 | V361 | L363 |
| 31 | I223 | R224 | H225 | N232 | S239 | A251 | K265 | R267 | N268 | L302 | F308 | G315 | T336 | S347 | G358 | V361 | L363 |
| 32 | M196 | P197 | H198 | N205 | S212 | D224 | K238 | R240 | — | L274 | H280 | D287 | F308 | G319 | G330 | F333 | L335 |
| 33 | M234 | K235 | A236 | K243 | S250 | R262 | P275 | P277 | K278 | G312 | N318 | Y325 | N335 | Y346 | — | N357 | A359 |
| 34 | A190 | R191 | H192 | N199 | S206 | A218 | K232 | K234 | R235 | L269 | Y275 | E282 | S300 | C311 | R322 | F325 | L327 |
| 35 | M277 | K278 | H279 | N286 | S293 | A305 | — | — | — | L331 | — | E342 | H360 | C371 | G382 | F385 | L387 |
| 36 | I227 | R228 | H229 | D236 | S243 | A255 | K269 | R271 | N272 | L306 | C312 | D319 | L340 | S351 | G362 | F365 | L367 |
| 37 | I187 | R188 | H189 | N196 | S203 | T215 | K229 | R231 | N232 | L266 | C272 | G279 | S300 | S311 | G322 | F325 | L327 |
| 38 | I194 | R195 | H196 | D203 | S210 | R222 | Q236 | K237 | R238 | L272 | L278 | N285 | S306 | — | — | — | — |
| 39 | M186 | H187 | L188 | N195 | S202 | P214 | N228 | K230 | R231 | L265 | C271 | D278 | S296 | C307 | G318 | F321 | L323 |
| 40 | I242 | R243 | H244 | N251 | S258 | T270 | K284 | R286 | N287 | L321 | C327 | G334 | S355 | S366 | G377 | F380 | L382 |
| 41 | I242 | R243 | H244 | N251 | S258 | T270 | K284 | R286 | N287 | L321 | C327 | G334 | S355 | S366 | G377 | F380 | L382 |
| 42 | M187 | K188 | H189 | N196 | S203 | A215 | T229 | K231 | G232 | L266 | — | E277 | H295 | C306 | G317 | F320 | L322 |
| 43 | I183 | R184 | H185 | S192 | S199 | K211 | T233 | P235 | R236 | T270 | Q276 | Q283 | T303 | D314 | G325 | Y328 | L330 |
| 44 | I183 | R184 | H185 | S192 | S199 | K211 | T233 | P235 | R236 | T270 | Q276 | Q283 | T303 | D314 | G325 | Y328 | L330 |
| 45 | M218 | H219 | H220 | N227 | — | — | — | — | — | — | — | — | — | — | — | — | — |
| 46 | M217 | H218 | H219 | N226 | — | — | — | — | — | — | — | — | — | — | — | — | — |
| 47 | I75 | R76 | H77 | N84 | S91 | A103 | K117 | R119 | N120 | L154 | F160 | G167 | T188 | S199 | G210 | V213 | L215 |
| 48 | I104 | R105 | H106 | N113 | S120 | A132 | K146 | R148 | S149 | L183 | C189 | D196 | S217 | S228 | G239 | F242 | L244 |
| 49 | M176 | R177 | H178 | N185 | S192 | A204 | N218 | R220 | R221 | L255 | N261 | D268 | G287 | S298 | — | — | — |
| 50 | — | — | — | — | — | S3 | K17 | K19 | H20 | L54 | D60 | S67 | S88 | R99 | G110 | Y113 | L115 |
| 51 | V170 | R171 | Y172 | E179 | S186 | — | — | A203 | P204 | L238 | — | P247 | F262 | H273 | P282 | D285 | — |
| 52 | V169 | Q170 | H171 | A178 | S185 | — | — | D204 | T205 | H238 | — | W247 | S262 | H273 | T282 | D285 | — |
| 53 | V169 | Q170 | H171 | A178 | S185 | — | — | D204 | T205 | H238 | — | W247 | S262 | H273 | T282 | D285 | — |
| 54 | — | — | — | — | — | — | — | — | — | — | — | — | — | S6 | G17 | V20 | L22 |
| 55 | V170 | R171 | Y172 | E179 | S186 | — | — | A203 | P204 | L238 | — | P247 | F262 | H273 | P282 | D285 | — |
| 56 | A168 | P169 | A170 | N177 | S184 | R196 | — | K204 | D205 | R238 | — | — | F261 | Y272 | S280 | K283 | R285 |
| 57 | A186 | R187 | Q188 | E195 | S202 | R214 | — | E219 | P220 | D254 | — | K261 | S276 | P287 | T296 | E299 | P301 |
| 58 | V174 | Q175 | H176 | A183 | S190 | R202 | — | K210 | D211 | E244 | — | — | S263 | H274 | D283 | D286 | D288 |
| 59 | V171 | K172 | S173 | A180 | G187 | R199 | — | K207 | Q208 | I241 | — | — | V264 | Y275 | K283 | K286 | F288 |
| 60 | I171 | K172 | H173 | N180 | S187 | — | G203 | F205 | F206 | I239 | S243 | — | — | P273 | M28 | A286 | L288 |
| 61 | L171 | K172 | H173 | E180 | S187 | G199 | — | A207 | T208 | T241 | — | T250 | — | H272 | P281 | D284 | — |
| 62 | — | — | — | — | — | — | — | — | — | — | — | — | — | — | — | — | — |
| 63 | V171 | K172 | S173 | R180 | G187 | R199 | — | K207 | Q208 | L241 | — | Q250 | T265 | Y276 | E284 | Q287 | L289 |
| 64 | V178 | Q179 | A180 | A187 | S194 | A206 | — | — | A217 | D250 | I256 | G263 | H275 | H286 | — | G297 | L299 |
| 65 | M184 | K185 | H186 | R193 | S200 | T212 | T222 | K224 | E225 | T259 | T265 | G272 | — | H292 | A303 | K306 | F308 |
| 66 | V171 | E172 | H173 | Q180 | S187 | Q199 | H207 | L209 | Q210 | G244 | R250 | — | S270 | H281 | E290 | L293 | S295 |
| 67 | V169 | R170 | F171 | A178 | G185 | R197 | — | K205 | I206 | L239 | — | — | R262 | Y273 | R281 | P284 | A286 |
| 68 | L171 | R172 | Y173 | A180 | G187 | — | G204 | K206 | A207 | E240 | Q244 | — | — | H270 | — | E278 | P280 |
| 69 | I172 | K173 | A174 | E181 | S188 | K200 | G212 | K214 | M215 | T249 | — | G257 | E272 | Y283 | — | P294 | A296 |
| 70 | A169 | R170 | Y171 | E178 | S185 | R197 | P209 | P211 | P212 | V246 | V252 | A257 | R283 | E294 | A303 | E306 | P308 |
| 71 | — | — | — | — | — | — | — | — | — | T184 | C190 | L197 | — | S213 | — | — | — |
| 72 | A188 | R189 | Y190 | E197 | S204 | R216 | P228 | P230 | P231 | V265 | V271 | A276 | R299 | E310 | A319 | E322 | P324 |
| 73 | T174 | A175 | A176 | E183 | S190 | K202 | — | K209 | M210 | V244 | — | W252 | I267 | F278 | — | Q289 | A291 |
| 74 | V175 | E176 | A177 | R184 | G191 | R203 | G209 | S211 | P212 | V243 | — | G252 | T267 | P278 | — | D289 | P291 |
| 75 | V175 | E176 | A177 | R184 | G191 | R203 | G209 | S211 | P212 | V243 | — | G252 | T267 | P278 | — | D289 | P291 |
| 76 | L173 | K174 | Y175 | D182 | S189 | — | E203 | I205 | S206 | K239 | K244 | — | V264 | H275 | I285 | S288 | L290 |
| 77 | A175 | A176 | A177 | E184 | S191 | K203 | — | K210 | M211 | V245 | — | Y253 | T268 | Y279 | — | P290 | A292 |
| 78 | L169 | K170 | A171 | Y178 | G185 | A197 | P206 | G208 | P209 | I241 | — | G250 | T265 | Y276 | — | L287 | L289 |
| 79 | V173 | K174 | A175 | H182 | G189 | K201 | T205 | G207 | P208 | V240 | — | K249 | S264 | Y275 | — | E286 | L288 |
| 80 | V184 | R185 | S186 | A193 | G200 | K212 | P224 | T226 | R227 | R261 | H267 | F274 | E284 | H295 | — | S306 | I308 |
| 81 | V175 | E176 | A177 | R184 | G191 | R203 | G209 | A211 | P212 | V243 | — | G252 | T267 | P278 | — | E289 | P291 |
| 82 | L172 | E173 | H174 | G181 | S188 | — | G204 | A206 | Y207 | V240 | R244 | — | F263 | H274 | E283 | A286 | P288 |
| 83 | L173 | K174 | Y175 | D182 | S189 | — | E203 | I205 | S206 | K239 | K244 | — | V264 | H275 | I285 | S288 | L290 |
| 84 | A185 | V186 | A187 | G194 | S201 | — | P223 | P225 | K226 | Q260 | G265 | F272 | A282 | Y293 | — | P304 | A306 |
| 85 | I169 | H170 | K171 | A178 | S185 | A197 | — | — | G198 | L232 | G238 | S245 | S253 | F264 | — | P275 | A277 |
| 86 | V167 | N168 | K169 | E176 | S183 | G195 | — | — | V196 | F229 | G235 | A242 | E251 | H262 | — | P273 | M275 |
| 87 | M180 | A181 | D182 | Q189 | S196 | Q207 | P213 | F215 | A216 | V247 | — | G256 | R271 | A282 | — | P293 | I295 |
| 88 | T172 | R173 | L174 | N181 | S188 | P200 | — | R207 | A208 | L242 | G248 | K250 | I261 | Y272 | — | K283 | Q285 |
| 89 | M166 | E167 | K168 | E175 | S182 | T194 | — | — | Q195 | E227 | G233 | — | K245 | Y256 | — | P267 | S269 |
| 90 | L176 | R177 | S178 | E185 | S192 | K204 | A217 | G219 | P220 | V253 | — | — | D274 | H285 | — | A296 | M298 |
| 91 | A177 | L178 | A179 | G186 | S193 | R205 | P226 | P228 | K229 | H263 | E268 | F275 | A294 | Y305 | — | P316 | A318 |
| 92 | A176 | R177 | S178 | Q185 | G192 | R204 | P216 | V218 | R219 | E253 | N259 | F266 | E276 | Y287 | — | P298 | A300 |
| 93 | L195 | R196 | A197 | D204 | S211 | T223 | T229 | A231 | R232 | V266 | — | G275 | H290 | P301 | — | P312 | L314 |
| 94 | L178 | V179 | S180 | E187 | G194 | K206 | A219 | G221 | P222 | V255 | — | — | D276 | Y287 | — | G298 | M300 |
| 95 | V170 | Q171 | A172 | A179 | S186 | A194 | — | — | — | E236 | — | S244 | Q255 | G266 | — | A277 | L279 |
| 96 | T171 | R172 | L173 | D180 | S187 | P199 | — | R206 | A207 | L241 | G247 | K249 | I260 | Y271 | — | K282 | Q284 |
| 97 | L168 | K169 | A170 | R177 | G184 | A196 | P206 | G208 | P209 | V241 | — | K250 | E265 | Y276 | — | R287 | L289 |
| 98 | M227 | K228 | A229 | K236 | S243 | A254 | K269 | P270 | K271 | S304 | — | G312 | — | — | L348 | S351 | A353 |
| 99 | M203 | K204 | H205 | N212 | S219 | A231 | K246 | K247 | G248 | L282 | T288 | E293 | H311 | C322 | G333 | F336 | L338 |
| 100 | M230 | K231 | A232 | K239 | S246 | E257 | K272 | P273 | K274 | S307 | — | G315 | — | — | L351 | A354 | A356 |
| 101 | M188 | C189 | H190 | D197 | S204 | A216 | R230 | K231 | A232 | L266 | H272 | E279 | S297 | C308 | G319 | F322 | L324 |
| 102 | M226 | K227 | A228 | K235 | S242 | A253 | T268 | P269 | K270 | V303 | — | R311 | — | — | L347 | E350 | A352 |
| 103 | M187 | R188 | Y189 | D196 | S203 | S215 | S226 | K227 | R228 | L262 | C268 | G274 | P292 | G303 | G314 | F317 | L319 |
| 104 | M256 | K257 | A258 | V265 | N272 | E283 | K298 | P299 | K300 | A333 | — | G341 | — | — | F377 | A380 | A382 |
| 105 | M222 | R223 | A224 | R231 | S238 | D249 | T264 | P265 | K266 | T299 | — | Q307 | — | — | L343 | D346 | A348 |
| 106 | I190 | R191 | H192 | N199 | S206 | A218 | G233 | R234 | N235 | L269 | C275 | N282 | P303 | S314 | G325 | F328 | L330 |
| 107 | M230 | K231 | A232 | K239 | S246 | R258 | K272 | P273 | K274 | S307 | G313 | T320 | S334 | S345 | A356 | L359 | Q361 |
| 108 | M251 | K252 | A253 | K260 | S267 | R279 | K293 | P294 | K295 | S328 | L334 | T341 | S355 | S366 | A377 | L380 | K382 |
| 109 | M221 | K222 | A223 | R230 | S237 | K249 | A263 | P264 | K265 | T298 | D304 | G311 | S325 | S336 | A347 | L350 | K352 |
| 110 | I235 | R236 | H237 | N244 | S251 | A263 | G278 | R279 | N280 | L314 | C320 | D327 | S348 | S359 | G370 | F373 | L375 |
| 111 | M222 | K223 | A224 | R231 | S238 | K250 | A264 | P265 | K266 | T299 | D305 | G312 | S326 | S337 | A348 | L351 | K353 |
| 112 | M183 | H184 | L185 | N192 | S199 | P211 | K226 | K227 | R228 | L262 | C268 | D275 | S293 | C304 | G315 | F318 | L320 |
| 113 | M237 | K238 | A239 | R246 | S253 | K265 | A279 | P280 | K281 | T314 | D320 | G327 | S341 | S352 | A363 | L366 | K368 |
| 114 | M230 | K231 | A232 | K239 | S246 | R258 | K272 | P273 | K274 | S307 | G313 | T320 | S334 | S345 | A356 | L359 | Q361 |
| 115 | M188 | C189 | H190 | D197 | S204 | A216 | R230 | K231 | A232 | L266 | H272 | E279 | S297 | C308 | G319 | F322 | L324 |
| 116 | M251 | K252 | A253 | K260 | S267 | R279 | K293 | P294 | K295 | S328 | L334 | T341 | S355 | S366 | A377 | L380 | K382 |
| 117 | M190 | K191 | H192 | N199 | S206 | A218 | K233 | K234 | G235 | L269 | A275 | E280 | H298 | C309 | G320 | F323 | L325 |
| | Pos | Pos | Pos | Pos | Pos | Pos | Pos | Pos | Pos | Pos | Pos | Pos | Pos | Pos | Pos | Pos | Pos |
| ID | 35 | 36 | 37 | 38 | 39 | 40 | 41 | 42 | 43 | 44 | 45 | 46 | 47 | 48 | 49 | 50 | 51 |
| 1 | D352 | T358 | L384 | L397 | F417 | T418 | T419 | F420 | A432 | T434 | K438 | L449 | T451 | F462 | Y470 | S476 | V477 |
| 2 | D352 | T358 | L384 | L397 | F417 | T418 | T419 | F420 | A432 | T434 | K438 | L449 | T451 | F462 | Y470 | S476 | V477 |
| 3 | D351 | T357 | L383 | L396 | F416 | T417 | T418 | F419 | A431 | T433 | K437 | L448 | T450 | F461 | Y469 | C475 | V476 |
| 4 | D351 | T357 | L383 | L396 | F416 | T417 | T418 | F419 | A431 | T433 | K437 | L448 | T450 | F461 | Y469 | S475 | V476 |
| 5 | D353 | T359 | L385 | L398 | F418 | T419 | T420 | F421 | A433 | T435 | K439 | L450 | T452 | F463 | Y471 | S477 | V478 |
| 6 | D323 | S329 | L355 | L368 | F388 | T389 | T390 | F391 | A403 | T405 | K409 | L420 | T422 | F433 | Y441 | S447 | V448 |
| 7 | D352 | S358 | L384 | L397 | Y417 | T418 | T419 | F420 | A432 | T434 | K438 | L449 | T451 | Y462 | Y470 | S476 | V477 |
| 8 | D328 | S334 | L360 | L373 | Y393 | T394 | T395 | F396 | A408 | T410 | K414 | L425 | A427 | Y438 | F446 | S452 | V453 |
| 9 | N327 | S333 | L359 | L372 | Y392 | T393 | T394 | F395 | A407 | T409 | K413 | L424 | A426 | Y437 | Y445 | A451 | V452 |
| 10 | N325 | S331 | L357 | L370 | Y390 | T391 | T392 | F393 | A405 | T407 | K411 | L422 | V424 | Y435 | Y443 | S449 | V450 |
| 11 | N322 | S328 | L354 | L367 | Y387 | T388 | T389 | F390 | A402 | T404 | R408 | L419 | A421 | Y432 | Y440 | S446 | V447 |
| 12 | D321 | V327 | L353 | L366 | Y386 | T387 | T388 | F389 | A401 | T403 | K407 | L418 | A420 | Y431 | Y439 | S445 | V446 |
| 13 | N322 | T328 | L354 | L367 | Y387 | T388 | T389 | F390 | A402 | T404 | T408 | L419 | A421 | F432 | Y440 | S446 | V447 |
| 14 | D323 | N329 | L355 | L368 | Y388 | T389 | T390 | F391 | A403 | K405 | K409 | L420 | A422 | Y433 | Y441 | S447 | V448 |
| 15 | D325 | I331 | L357 | L370 | Y390 | T391 | T392 | F393 | A405 | T407 | K411 | L422 | V424 | F435 | Y443 | S449 | V450 |
| 16 | D325 | I331 | L357 | L370 | Y390 | T391 | T392 | F393 | A405 | T407 | K411 | L422 | V424 | F435 | Y443 | S449 | V450 |
| 17 | N322 | T328 | L354 | L367 | Y387 | T388 | T389 | F390 | A402 | T404 | K408 | L419 | A421 | Y432 | Y440 | L446 | V447 |
| 18 | N323 | A329 | L355 | L368 | Y388 | T389 | T390 | F391 | S403 | T405 | K409 | L420 | V422 | Y433 | Y441 | S447 | V448 |
| 19 | N318 | A324 | L350 | L363 | Y383 | T384 | T385 | F386 | S398 | T400 | K404 | L415 | V417 | Y428 | Y436 | S442 | V443 |
| 20 | N324 | D330 | L356 | L369 | Y389 | T390 | T391 | F392 | A404 | R406 | K410 | L421 | A423 | Y434 | Y442 | S448 | V449 |
| 21 | N321 | D327 | L353 | L366 | Y386 | T387 | T388 | F389 | A401 | R403 | K407 | L418 | A420 | C431 | Y439 | S445 | V446 |
| 22 | N326 | N332 | L358 | L371 | Y391 | T392 | T393 | F394 | A406 | T408 | K412 | L423 | V425 | Y436 | Y444 | S450 | V451 |
| 23 | N330 | N336 | L362 | L375 | Y395 | T396 | T397 | F398 | A410 | T412 | K416 | L427 | V429 | Y440 | Y448 | S454 | V455 |
| 24 | N319 | N325 | L351 | L364 | Y384 | T385 | T386 | F387 | A399 | T401 | K405 | L416 | V418 | Y429 | Y437 | S443 | V444 |
| 25 | N365 | N371 | L397 | L410 | Y430 | T431 | T432 | F433 | A445 | T447 | K451 | L462 | V464 | Y475 | Y483 | S489 | V490 |
| 26 | N291 | S297 | L323 | L336 | Y356 | T357 | T358 | F359 | A371 | R373 | K377 | L388 | T390 | Y401 | Y409 | S415 | V416 |
| 27 | D362 | N368 | L394 | L408 | Y428 | T429 | T430 | F431 | A443 | T445 | K449 | L460 | V462 | Y473 | Y481 | S487 | V488 |
| 28 | D364 | D370 | L396 | L410 | Y430 | T431 | T432 | F433 | A445 | T447 | K451 | L462 | V464 | Y475 | Y483 | S489 | V490 |
| 29 | N296 | N302 | L328 | L341 | Y361 | T362 | T363 | F364 | A376 | T378 | K382 | L393 | V395 | Y406 | Y414 | S420 | V421 |
| 30 | D364 | D370 | L396 | L410 | Y430 | T431 | T432 | F433 | A445 | T447 | K451 | L462 | V464 | Y475 | Y483 | S489 | V490 |
| 31 | D364 | D370 | L396 | L410 | Y430 | T431 | T432 | F433 | A445 | T447 | K451 | L462 | V464 | Y475 | Y483 | S489 | V490 |
| 32 | D336 | T342 | L368 | L381 | Y401 | T402 | T403 | F404 | A416 | L418 | K422 | L433 | V435 | Y446 | Y454 | L460 | V461 |
| 33 | A360 | Y367 | L399 | L409 | L429 | L430 | N431 | Y432 | K444 | E446 | V450 | L461 | K463 | V476 | F484 | D490 | L491 |
| 34 | D328 | S334 | L360 | L373 | Y393 | T394 | T395 | F396 | — | — | — | L402 | C404 | Y408 | Y416 | L422 | V423 |
| 35 | N388 | K394 | L420 | L433 | Y453 | T454 | T455 | F456 | A468 | T470 | K474 | L485 | V487 | Y498 | Y506 | S512 | V513 |
| 36 | D368 | D374 | L400 | L414 | F434 | T435 | T436 | F437 | A449 | T451 | K455 | L466 | V468 | H479 | Y487 | L493 | A494 |
| 37 | D328 | D334 | L360 | L374 | Y394 | T395 | S396 | F397 | A409 | T411 | K415 | L426 | V428 | H439 | Y447 | L453 | V454 |
| 38 | — | T315 | L341 | L354 | F374 | T375 | T376 | F377 | S389 | L391 | Q395 | L406 | V408 | Y419 | Y427 | S433 | V434 |
| 39 | N324 | D330 | L356 | L369 | Y389 | T390 | T391 | F392 | A404 | — | — | — | — | — | — | — | — |
| 40 | D383 | D389 | L415 | L429 | Y449 | T450 | S451 | F452 | A464 | T466 | K470 | L481 | V483 | H494 | Y502 | L508 | V509 |
| 41 | D383 | D389 | L415 | L429 | Y449 | T450 | S451 | F452 | A464 | T466 | K470 | L481 | V483 | H494 | Y502 | L508 | V509 |
| 42 | N323 | K329 | L355 | L368 | Y388 | T389 | T390 | F391 | A403 | T405 | — | — | — | — | — | — | — |
| 43 | D331 | I337 | L363 | L377 | F397 | T398 | T399 | F400 | R412 | K414 | L418 | I429 | V431 | Y442 | Y450 | N456 | V457 |
| 44 | D331 | I337 | L363 | L377 | F397 | T398 | T399 | F400 | R412 | K414 | L418 | I429 | V431 | Y442 | Y450 | N456 | V457 |
| 45 | — | — | — | — | — | — | — | — | — | — | — | — | — | — | — | — | — |
| 46 | — | — | — | — | — | — | — | — | — | — | — | — | — | — | — | — | — |
| 47 | D216 | D222 | L248 | L262 | Y282 | T283 | T284 | F285 | A297 | T299 | K303 | L314 | V316 | Y327 | Y335 | S341 | V342 |
| 48 | D245 | D251 | L277 | L291 | F311 | T312 | T313 | F314 | A326 | T328 | K332 | L343 | V345 | H356 | Y364 | S370 | A371 |
| 49 | — | — | — | — | — | — | — | — | — | — | — | — | — | — | — | — | — |
| 50 | D116 | M122 | L148 | L161 | Y181 | T182 | T183 | F184 | A196 | L198 | R202 | L213 | V215 | Y226 | Y234 | M240 | V241 |
| 51 | R286 | E293 | L319 | L330 | L350 | T351 | T352 | F353 | L365 | E367 | E371 | L382 | I384 | R395 | Y403 | A409 | V410 |
| 52 | L286 | T293 | L319 | L330 | L350 | T351 | T352 | F353 | S365 | A367 | Q371 | L382 | V384 | H395 | Y403 | T409 | V410 |
| 53 | L286 | T293 | L319 | L330 | L350 | T351 | T352 | F353 | S365 | A367 | Q371 | L382 | V384 | H395 | Y403 | T409 | V410 |
| 54 | D23 | D29 | L55 | L69 | Y89 | T90 | T91 | F92 | A104 | T106 | K110 | L121 | V123 | Y134 | Y142 | S148 | V149 |
| 55 | R286 | E293 | L319 | L330 | L350 | T351 | T352 | F353 | L365 | E367 | E371 | L382 | I384 | R395 | Y403 | A409 | V410 |
| 56 | A286 | L293 | L319 | L329 | F349 | T350 | T351 | F352 | K364 | D366 | K370 | V381 | L383 | R394 | Y402 | K408 | I409 |
| 57 | L302 | E309 | L335 | L345 | L365 | T366 | V367 | M368 | L380 | A382 | L386 | L397 | V399 | F410 | Y418 | H424 | F425 |
| 58 | M289 | I296 | L322 | L332 | L352 | S353 | T354 | Y355 | L367 | D369 | D373 | L384 | V386 | V397 | Y405 | K411 | 1412 |
| 59 | K289 | Y296 | L322 | L332 | F352 | T353 | L354 | F355 | E367 | R369 | L373 | M384 | I386 | F397 | Y405 | E411 | H412 |
| 60 | A289 | Q295 | L321 | L331 | L351 | T352 | N353 | Y354 | L366 | R368 | R372 | L383 | V385 | V396 | Y404 | E410 | Y411 |
| 61 | T285 | P292 | L318 | L329 | L349 | T350 | T351 | F352 | A364 | D366 | R370 | L381 | V383 | A394 | Y402 | A408 | A409 |
| 62 | — | — | — | — | — | — | — | — | — | — | — | — | — | — | — | — | — |
| 63 | A290 | Y297 | L323 | L333 | F353 | T354 | L355 | F356 | M368 | K370 | I374 | M385 | I387 | L398 | Y406 | E412 | H413 |
| 64 | A300 | E307 | L333 | L343 | L363 | S364 | A365 | F366 | G378 | D380 | L384 | L395 | I397 | R408 | Y416 | E422 | L423 |
| 65 | K309 | K316 | L342 | L352 | L373 | T374 | V375 | Y376 | R388 | A390 | V394 | L405 | V407 | T418 | Y426 | E432 | S433 |
| 66 | L296 | D303 | L329 | L339 | I359 | N360 | V361 | M362 | L374 | E376 | R380 | L391 | V393 | H404 | L412 | I418 | V419 |
| 67 | A287 | V294 | L320 | L330 | L350 | T351 | T352 | F353 | R365 | N367 | I371 | L382 | L384 | R395 | Y403 | E409 | I410 |
| 68 | I281 | D287 | L313 | L323 | L343 | T344 | V345 | F346 | P358 | T360 | L364 | L375 | I377 | H388 | Y396 | K402 | V403 |
| 69 | A297 | R304 | L330 | L340 | T360 | I361 | N362 | L363 | Q375 | D377 | I381 | I392 | A394 | R405 | Y413 | E419 | A420 |
| 70 | L309 | E316 | L342 | L352 | L372 | T373 | V374 | L375 | M387 | L389 | M393 | L404 | V406 | V417 | Y425 | R431 | F432 |
| 71 | — | — | — | L230 | — | — | — | — | — | — | — | — | — | — | — | — | — |
| 72 | L325 | E332 | L358 | L368 | L388 | T389 | V390 | L391 | M403 | L405 | M409 | L420 | V422 | V433 | Y441 | R447 | F448 |
| 73 | A292 | P299 | L325 | L335 | T355 | T356 | T357 | L358 | R370 | D372 | I376 | L387 | I389 | R400 | Y408 | E414 | R415 |
| 74 | S292 | P299 | L325 | L335 | L355 | T356 | V357 | F358 | A370 | D372 | E376 | L387 | V389 | R400 | L408 | E414 | T415 |
| 75 | S292 | P299 | L325 | L335 | L355 | T356 | V357 | F358 | A370 | D372 | E376 | L387 | V389 | R400 | L408 | E414 | T415 |
| 76 | L291 | Y298 | L324 | L334 | L354 | T355 | T356 | Y357 | L369 | Q371 | L375 | L386 | I388 | L399 | P407 | D413 | R414 |
| 77 | A293 | P300 | L326 | L336 | T356 | I357 | T358 | L359 | Q371 | E373 | I377 | L388 | I390 | R401 | Y409 | E415 | R416 |
| 78 | S290 | E297 | L323 | L333 | I353 | R354 | V355 | M356 | L368 | D370 | V374 | M385 | I387 | K398 | Y406 | E412 | R413 |
| 79 | A289 | E296 | L322 | L332 | I352 | R353 | A354 | M355 | A367 | E369 | A373 | M384 | I386 | K397 | Y405 | E411 | K412 |
| 80 | A309 | P316 | L342 | L352 | L372 | S373 | N374 | Y375 | M387 | D389 | V393 | L404 | A406 | L418 | Y426 | N432 | R433 |
| 81 | S292 | P299 | L325 | L335 | L355 | T356 | V357 | F358 | T370 | D372 | E376 | L387 | V389 | R400 | F408 | E414 | T415 |
| 82 | L289 | E296 | L322 | L332 | L352 | T353 | V354 | M355 | L367 | Q369 | L373 | L384 | L386 | S397 | Y405 | P411 | W412 |
| 83 | L291 | Y298 | L324 | L334 | L354 | T355 | T356 | F357 | L369 | Q371 | L375 | L386 | I388 | L399 | P407 | D413 | R414 |
| 84 | S307 | L314 | L340 | L350 | F370 | L371 | S372 | F373 | L394 | P396 | A400 | L411 | T413 | L425 | Y433 | Q439 | R440 |
| 85 | A278 | H285 | L311 | A321 | F341 | T342 | T343 | F344 | Q356 | E358 | K362 | — | D374 | L387 | Y395 | — | R398 |
| 86 | S276 | N283 | L309 | S319 | I339 | T340 | S341 | Y342 | L354 | E356 | L360 | — | Q372 | L385 | F393 | — | Y396 |
| 87 | P296 | P303 | L329 | L339 | L359 | T360 | V361 | F362 | A374 | D376 | L380 | L391 | V393 | R404 | S412 | E418 | R419 |
| 88 | L286 | Y293 | L318 | L328 | Y348 | A349 | F350 | F351 | K363 | D365 | R369 | L380 | Y382 | R395 | Y403 | S409 | R410 |
| 89 | A270 | N277 | L303 | A313 | I333 | T334 | S335 | F336 | L348 | D350 | K354 | — | K366 | R378 | Y386 | — | D389 |
| 90 | A299 | P306 | L332 | L342 | L362 | R363 | S364 | M365 | L377 | D379 | M383 | M394 | I396 | R407 | Y415 | K421 | R422 |
| 91 | S319 | P326 | L352 | L362 | L382 | I383 | S384 | F385 | L406 | P408 | A412 | L423 | T425 | L437 | Y445 | Q451 | R452 |
| 92 | S301 | P308 | L334 | L344 | L364 | T365 | N366 | F367 | L379 | N381 | V385 | L396 | K398 | L410 | Y418 | L424 | R425 |
| 93 | S315 | E322 | V348 | F358 | L378 | R379 | T380 | F381 | H393 | D395 | N399 | L410 | V412 | R423 | Y431 | Q437 | L438 |
| 94 | S301 | P308 | L334 | L344 | L364 | R365 | S366 | M367 | L379 | D381 | V385 | M396 | I398 | R409 | Y417 | R423 | R424 |
| 95 | A280 | P287 | L313 | L323 | L343 | T344 | A345 | F346 | R357 | D359 | L363 | L374 | I376 | T387 | Y395 | D401 | R402 |
| 96 | L285 | Y292 | L317 | L327 | Y347 | A348 | C349 | F350 | K362 | D364 | I368 | L379 | Y381 | R394 | Y402 | A408 | R409 |
| 97 | S290 | E297 | L323 | L333 | I353 | R354 | V355 | M356 | K368 | E370 | T374 | M385 | I387 | R398 | Y406 | E412 | K413 |
| 98 | E354 | Y360 | L386 | L402 | L422 | L423 | N424 | Y425 | K437 | E439 | V443 | L454 | S458 | V469 | F477 | D483 | L484 |
| 99 | N339 | K345 | L371 | L384 | Y404 | T405 | T406 | F407 | A419 | T421 | K425 | L436 | I438 | Y449 | Y457 | S463 | V464 |
| 100 | D357 | Y363 | L389 | L405 | L425 | L426 | N427 | Y428 | K440 | E442 | V446 | L457 | N461 | V472 | F480 | D486 | L487 |
| 101 | N325 | S331 | L357 | L370 | Y390 | T391 | T392 | F393 | A405 | T407 | K411 | L422 | V424 | Y435 | Y443 | S449 | V450 |
| 102 | D353 | Y359 | L385 | L401 | L421 | L422 | N423 | Y424 | K436 | E438 | V442 | L453 | K457 | V468 | F476 | D482 | I483 |
| 103 | N320 | S326 | L352 | L365 | Y385 | T386 | T387 | F388 | A400 | R402 | K406 | L417 | A419 | Y430 | Y438 | L444 | V445 |
| 104 | D383 | H389 | L415 | L431 | 1451 | L452 | S453 | F454 | K466 | Q468 | A472 | L483 | S487 | V498 | F506 | D512 | L513 |
| 105 | D349 | Y355 | L381 | L397 | L417 | L418 | N419 | Y420 | K432 | E434 | V438 | L449 | T453 | V464 | F472 | D478 | R479 |
| 106 | D331 | D337 | L363 | L377 | F397 | T398 | T399 | F400 | A412 | T414 | K418 | L429 | V431 | H442 | Y450 | S456 | A457 |
| 107 | F362 | A368 | L395 | L405 | L425 | L426 | N427 | Y428 | K440 | E442 | V446 | L457 | N461 | V472 | F480 | D486 | L487 |
| 108 | F383 | A389 | L416 | L426 | I446 | L447 | S448 | Y449 | K461 | K463 | A467 | L478 | D482 | V493 | F501 | D507 | L508 |
| 109 | F353 | A359 | L386 | L396 | L416 | L417 | N418 | Y419 | K431 | E433 | V437 | L448 | R452 | V463 | F471 | D477 | R478 |
| 110 | D376 | D382 | L408 | L422 | F442 | T443 | T444 | F445 | A457 | T459 | K463 | L474 | V476 | H487 | Y495 | L501 | A502 |
| 111 | F354 | A360 | L387 | L397 | L417 | L418 | N419 | Y420 | K432 | E434 | V438 | L449 | R453 | V464 | F472 | D478 | R479 |
| 112 | N321 | D327 | L353 | L366 | Y386 | T387 | T388 | F389 | A401 | R403 | K407 | L418 | A420 | C431 | Y439 | S445 | V446 |
| 113 | F369 | A375 | L402 | L412 | L432 | L433 | N434 | Y435 | K447 | E449 | V453 | L464 | R468 | V479 | F487 | D493 | R494 |
| 114 | F362 | A368 | L395 | L405 | L425 | L426 | N427 | Y428 | K440 | E442 | V446 | L457 | N461 | V472 | F480 | D486 | L487 |
| 115 | N325 | S331 | L357 | L370 | Y390 | T391 | T392 | F393 | A405 | T407 | K411 | L422 | V424 | Y435 | Y443 | S449 | V450 |
| 116 | F383 | A389 | L416 | L426 | I446 | L447 | S448 | Y449 | K461 | K463 | A467 | L478 | D482 | V493 | F501 | D507 | L508 |
| 117 | N326 | K332 | L358 | L371 | Y391 | T392 | T393 | F394 | A406 | T408 | K412 | L423 | V425 | Y436 | Y444 | S450 | V451 |

| | Pos | Pos | Pos | Pos | Pos |
|---|---|---|---|---|---|
| ID | 52 | 53 | 54 | 55 | 56 |
| 1 | D482 | Y493 | K498 | E515 | K528 |
| 2 | D482 | Y493 | K498 | E515 | K528 |
| 3 | D481 | Y492 | K497 | E514 | K527 |
| 4 | D481 | Y492 | K497 | E514 | K527 |
| 5 | D483 | Y494 | K499 | E516 | K529 |
| 6 | D453 | Y464 | K469 | E486 | K499 |
| 7 | E482 | Y493 | K498 | E515 | K525 |
| 8 | D458 | Y469 | K474 | D491 | K504 |
| 9 | D457 | Y468 | K473 | D490 | K503 |
| 10 | E455 | Y466 | K471 | D488 | K500 |
| 11 | D452 | F463 | K468 | D485 | T498 |
| 12 | E451 | Y462 | R467 | E484 | K497 |
| 13 | D452 | Y463 | R468 | D485 | S498 |
| 14 | E453 | Y464 | R469 | D486 | K499 |
| 15 | E455 | Y466 | K471 | E488 | K501 |
| 16 | E455 | Y466 | K471 | E488 | K501 |
| 17 | D452 | Y463 | R468 | D485 | T498 |
| 18 | E453 | Y464 | R469 | D486 | S499 |
| 19 | E448 | Y459 | R464 | D481 | S494 |
| 20 | D454 | Y465 | R470 | D487 | S500 |
| 21 | D451 | Y462 | K467 | D484 | T497 |
| 22 | D456 | Y467 | R472 | D489 | K502 |
| 23 | D460 | Y471 | R476 | D493 | K506 |
| 24 | D449 | Y460 | R465 | D482 | K495 |
| 25 | D495 | Y506 | R511 | D528 | K541 |
| 26 | E421 | Y432 | K437 | E454 | K467 |
| 27 | E493 | Y504 | K509 | E526 | N539 |
| 28 | E495 | Y506 | K511 | D528 | N541 |
| 29 | D426 | Y437 | R442 | D459 | K472 |
| 30 | E495 | Y506 | K511 | D528 | N541 |
| 31 | E495 | Y506 | K511 | D528 | N541 |
| 32 | D466 | Y477 | R482 | D499 | — |
| 33 | T496 | L509 | V514 | A531 | F544 |
| 34 | E428 | Y439 | R444 | D461 | K474 |
| 35 | D518 | Y529 | R534 | D551 | K564 |
| 36 | G499 | Y510 | K515 | D532 | A543 |
| 37 | A459 | Y470 | K475 | D492 | D505 |
| 38 | D439 | F450 | R455 | D472 | T485 |
| 39 | — | — | — | — | — |
| 40 | A514 | Y525 | — | K537 | — |
| 41 | A514 | Y525 | — | K537 | — |
| 42 | — | — | — | — | — |
| 43 | Q462 | Y473 | R478 | E495 | K508 |
| 44 | Q462 | Y473 | R478 | E495 | K508 |
| 45 | — | — | — | — | — |
| 46 | — | — | — | — | — |
| 47 | E347 | Y358 | K363 | D380 | N393 |
| 48 | G376 | — | K383 | D400 | V413 |
| 49 | — | — | — | — | — |
| 50 | E246 | Y257 | S262 | — | — |
| 51 | H415 | L426 | M431 | R448 | G461 |
| 52 | D415 | F426 | R431 | — | A458 |
| 53 | D415 | F426 | R431 | — | T458 |
| 54 | E154 | Y165 | K170 | D187 | N200 |
| 55 | H415 | L426 | M431 | R448 | G461 |
| 56 | D414 | F425 | R430 | E447 | — |
| 57 | A430 | M441 | R446 | E463 | — |
| 58 | N417 | F428 | R433 | Q450 | — |
| 59 | D417 | I428 | R433 | N450 | — |
| 60 | D416 | L427 | R432 | A449 | — |
| 61 | E414 | F425 | R430 | R447 | V460 |
| 62 | — | — | — | — | — |
| 63 | E418 | L429 | R434 | K451 | — |
| 64 | S428 | L439 | R444 | E461 | — |
| 65 | A438 | F449 | R454 | E471 | — |
| 66 | I424 | L435 | R440 | E457 | — |
| 67 | D415 | F426 | R431 | E448 | — |
| 68 | T408 | L419 | R424 | N441 | — |
| 69 | E425 | F436 | R441 | E458 | A471 |
| 70 | E437 | V448 | R453 | R470 | — |
| 71 | — | — | — | — | — |
| 72 | E453 | V464 | R469 | R486 | — |
| 73 | V420 | F431 | R436 | E453 | A466 |
| 74 | R420 | L429 | L434 | E451 | — |
| 75 | R420 | L429 | L434 | E451 | — |
| 76 | S419 | I430 | I435 | — | — |
| 77 | E421 | L432 | R437 | E454 | A467 |
| 78 | F418 | L429 | Y434 | R451 | — |
| 79 | F417 | L428 | Y433 | E450 | — |
| 80 | D438 | L449 | I454 | S471 | N484 |
| 81 | R420 | L429 | L434 | E451 | — |
| 82 | K417 | F428 | V433 | E450 | — |
| 83 | S419 | I430 | I435 | — | — |
| 84 | Q445 | V457 | L462 | Q479 | — |
| 85 | H403 | S416 | R421 | D438 | — |
| 86 | H401 | I414 | Y419 | A436 | — |
| 87 | E424 | L433 | L438 | E455 | — |
| 88 | D415 | I426 | K431 | E448 | — |
| 89 | H394 | V407 | E412 | E429 | — |
| 90 | Q427 | L438 | Y443 | D460 | — |
| 91 | Q457 | V469 | L474 | Q491 | — |
| 92 | N430 | L441 | T446 | P463 | — |
| 93 | E443 | L454 | Y459 | E476 | — |
| 94 | E429 | L440 | Y445 | D462 | — |
| 95 | D407 | F418 | R423 | Q440 | — |
| 96 | D414 | I425 | K430 | E447 | — |
| 97 | F418 | F429 | Y434 | E451 | — |
| 98 | K489 | L502 | V507 | T524 | — |
| 99 | D469 | Y480 | R485 | D502 | N515 |
| 100 | K492 | L505 | V510 | A527 | — |
| 101 | E455 | Y466 | K471 | D488 | K500 |
| 102 | K488 | L501 | V506 | A523 | — |
| 103 | E450 | Y461 | K466 | E483 | K496 |
| 104 | K518 | L531 | V536 | A553 | — |
| 105 | K484 | L497 | V502 | S519 | — |
| 106 | G462 | Y473 | K478 | D495 | D508 |
| 107 | K492 | L505 | V510 | A527 | — |
| 108 | K513 | L526 | V531 | A548 | — |
| 109 | K483 | L496 | V501 | S518 | — |
| 110 | G507 | Y518 | K523 | D540 | G549 |
| 111 | K484 | L497 | V502 | S519 | — |
| 112 | D451 | Y462 | K467 | D484 | S494 |
| 113 | K499 | L512 | V517 | S534 | — |
| 114 | K492 | L505 | V510 | A527 | — |
| 115 | E455 | Y466 | K471 | D488 | S497 |
| 116 | K513 | L526 | V531 | A548 | — |
| 117 | D456 | Y467 | R472 | D489 | K502 |

[0764] Assays to test for the functionality of such mutants are readily available in the art, and respectively, described in the Example section of the present invention.

[0765] In a preferred embodiment, the mutated PPO refers to a polypeptide of SEQ ID NO: 1, 2, 3, 4, 5, 6, 7, 8, 9, 10, 11, 12, 13, 14, 15, 16, 17, 18, 19, 20, 21, 22, 23, 24, 25, 26, 27, 28, 29, 30, 31, 32, 33, 34, 35, 36, 37, 38, 39, 40, 41, 42, 43, 44, 45, 46, 47, 48, 49, 50, 51, 52, 53, 54, 55, 56, 57, 58, 59, 60, 61, 62, 63, 64, 65, 66, 67, 68, 69, 70, 71, 72, 73, 74, 75, 76, 77, 78, 79, 80, 81, 82, 83, 84, 85, 86, 87, 88, 89, 90, 91, 92, 93, 94, 95, 96, 97, 98, 99, 100, 101, 102, 103, 104, 105, 106, 107, 108, 109, 110, 111, 112, 113, 114, 115, 116, or 117, in which the amino acid sequence differs at Mutated site 1 (which corresponds to Arg128 of SEQ ID NO: 1) according to Table 2a, and/or at Mutated site 5 (which corresponds to Phe420 of SEQ ID NO: 1) according to Table 2a.

[0766] Examples of differences at these amino acid positions include, but are not limited to, one or more of the following:
[0767] the amino acid at Mutated site 1 is other than Arginine (or Tryosine, or Cysteine; as the case may be according to Table 2a);
[0768] the amino acid at Mutated site 5 is other than Phenylalanine (or Methionine, or Tyrosine, or Leucine, as the case may be according to Table 2a),

[0769] In particularly preferred embodiment, the mutated PPO comprises a sequence of SEQ ID NO: 1, 2, 3, 4, 5, 6, 7, 8, 9, 10, 11, 12, 13, 14, 15, 16, 17, 18, 19, 20, 21, 22, 23, 24, 25, 26, 27, 28, 29, 30, 31, 32, 33, 34, 35, 36, 37, 38, 39, 40, 41, 42, 43, 44, 45, 46, 47, 48, 49, 50, 51, 52, 53, 54, 55, 56, 57, 58, 59, 60, 61, 62, 63, 64, 65, 66, 67, 68, 69, 70, 71, 72, 73, 74, 75, 76, 77, 78, 79, 80, 81, 82, 83, 84, 85, 86, 87, 88, 89, 90, 91, 92, 93, 94, 95, 96, 97, 98, 99, 100, 101, 102, 103, 104, 105, 106, 107, 108, 109, 110, 111, 112, 113, 114, 115, 116, 117, 577, 579, 581, 583, 585, 587, 589, 591, 593, 595, 597, 599, 601, 603, 605, 607, 609, 611, 613, 615, 617, 619, 621, 623, 625, 627, or 637, a variant, derivative, orthologue, paralogue or homologue thereof, in which:
[0770] the amino acid at Mutated site 1 (which corresponds to Arg128 of SEQ ID NO: 1) is Leu, Ala, Val, lie, Met, Tyr, Gly, Asn, Cys, Phe, Ser, Thr, Gln, or His, and the amino acid at Mutated site 5 (which corresponds to Phe420 of SEQ ID NO: 1) is Ala, Leu, Val, lie, or Met.

[0771] In another preferred embodiment, the mutated PPO comprises a sequence of SEQ ID NO: 1, 2, 3, 4, 5, 6, 7, 8, 9, 10, 11, 12, 13, 14, 15, 16, 17, 18, 19, 20, 21, 22, 23, 24, 25, 26, 27, 28, 29, 30, 31, 32, 33, 34, 35, 36, 37, 38, 39, 40, 41, 42, 43, 44, 45, 46, 47, 48, 49, 50, 51, 52, 53, 54, 55, 56, 57, 58, 59, 60, 61, 62, 63, 64, 65, 66, 67, 68, 69, 70, 71, 72, 73, 74, 75, 76, 77, 78, 79, 80, 81, 82, 83, 84, 85, 86, 87, 88, 89, 90, 91, 92, 93, 94, 95, 96, 97, 98, 99, 100, 101, 102, 103, 104, 105, 106, 107, 108, 109, 110, 111, 112, 113, 114, 115, 116, 117, 577, 579, 581, 583, 585, 587, 589, 591, 593, 595, 597, 599, 601, 603, 605, 607, 609, 611, 613, 615, 617, 619, 621, 623, 625, 627, or 637, a variant, derivative, orthologue, paralogue or homologue thereof, in which: the amino acid at Mutated site 1 is Leu, and the amino acid at Mutated site 5 is Ala.

[0772] In another preferred embodiment, the mutated PPO comprises a sequence of SEQ ID NO: 1, 2, 3, 4, 5, 6, 7, 8, 9, 10, 11, 12, 13, 14, 15, 16, 17, 18, 19, 20, 21, 22, 23, 24, 25, 26, 27, 28, 29, 30, 31, 32, 33, 34, 35, 36, 37, 38, 39, 40, 41, 42, 43, 44, 45, 46, 47, 48, 49, 50, 51, 52, 53, 54, 55, 56, 57, 58, 59, 60, 61, 62, 63, 64, 65, 66, 67, 68, 69, 70, 71, 72, 73, 74, 75, 76, 77, 78, 79, 80, 81, 82, 83, 84, 85, 86, 87, 88, 89, 90, 91, 92, 93, 94, 95, 96, 97, 98, 99, 100, 101, 102, 103, 104, 105, 106, 107, 108, 109, 110, 111, 112, 113, 114, 115, 116, 117, 577, 579, 581, 583, 585, 587, 589, 591, 593, 595, 597, 599, 601, 603, 605, 607, 609, 611, 613, 615, 617, 619, 621, 623, 625, 627, or 637, a variant, derivative, orthologue, paralogue or homologue thereof, in which: the amino acid at Mutated site 1 is Leu, and the amino acid at Mutated site 5 is Leu.

[0773] In another preferred embodiment, the mutated PPO comprises a sequence of SEQ ID NO: 1, 2, 3, 4, 5, 6, 7, 8, 9, 10, 11, 12, 13, 14, 15, 16, 17, 18, 19, 20, 21, 22, 23, 24, 25, 26, 27, 28, 29, 30, 31, 32, 33, 34, 35, 36, 37, 38, 39, 40, 41, 42, 43, 44, 45, 46, 47, 48, 49, 50, 51, 52, 53, 54, 55, 56, 57, 58, 59, 60, 61, 62, 63, 64, 65, 66, 67, 68, 69, 70, 71, 72, 73, 74, 75, 76, 77, 78, 79, 80, 81, 82, 83, 84, 85, 86, 87, 88, 89, 90, 91, 92, 93, 94, 95, 96, 97, 98, 99, 100, 101, 102, 103, 104, 105, 106, 107, 108, 109, 110, 111, 112, 113, 114, 115, 116, 117, 577, 579, 581, 583, 585, 587, 589, 591, 593, 595, 597, 599, 601, 603, 605, 607, 609, 611, 613, 615, 617, 619, 621, 623, 625, 627, or 637, a variant, derivative, orthologue, paralogue or homologue thereof, in which: the amino acid at Mutated site 1 is Leu, and the amino acid at Mutated site 5 is Val.

[0774] In another preferred embodiment, the mutated PPO comprises a sequence of SEQ ID NO: 1, 2, 3, 4, 5, 6, 7, 8, 9, 10, 11, 12, 13, 14, 15, 16, 17, 18, 19, 20, 21, 22, 23, 24, 25, 26, 27, 28, 29, 30, 31, 32, 33, 34, 35, 36, 37, 38, 39, 40, 41, 42, 43, 44, 45, 46, 47, 48, 49, 50, 51, 52, 53, 54, 55, 56, 57, 58, 59, 60, 61, 62, 63, 64, 65, 66, 67, 68, 69, 70, 71, 72, 73, 74, 75, 76, 77, 78, 79, 80, 81, 82, 83, 84, 85, 86, 87, 88, 89, 90, 91, 92, 93, 94, 95, 96, 97, 98, 99, 100, 101, 102, 103, 104, 105, 106, 107, 108, 109, 110, 111, 112, 113, 114, 115, 116, 117, 577, 579, 581, 583, 585, 587, 589, 591, 593, 595, 597, 599, 601, 603, 605, 607, 609, 611, 613, 615, 617, 619, 621, 623, 625, 627, or 637, a variant, derivative, orthologue, paralogue or homologue thereof, in which: the amino acid at Mutated site 1 is Leu, and the amino acid at Mutated site 5 is Ile.

[0775] In another preferred embodiment, the mutated PPO comprises a sequence of SEQ ID NO: 1, 2, 3,4, 5, 6, 7, 8, 9, 10, 11, 12, 13, 14, 15, 16, 17, 18, 19, 20, 21, 22, 23, 24, 25, 26, 27, 28, 29, 30, 31, 32, 33, 34, 35, 36, 37, 38, 39, 40, 41, 42, 43, 44, 45, 46, 47, 48, 49, 50, 51, 52, 53, 54, 55, 56, 57, 58, 59, 60, 61, 62, 63, 64, 65, 66, 67, 68, 69, 70, 71, 72, 73, 74, 75, 76, 77, 78, 79, 80, 81, 82, 83, 84, 85, 86, 87, 88, 89, 90, 91, 92, 93, 94, 95, 96, 97, 98, 99, 100, 101, 102, 103, 104, 105, 106, 107, 108, 109, 110, 111, 112, 113, 114, 115, 116, 117, 577, 579, 581, 583, 585, 587, 589, 591, 593, 595, 597, 599, 601, 603, 605, 607, 609, 611, 613, 615, 617, 619, 621, 623, 625, 627, or 637, a variant, derivative, orthologue, paralogue or homologue thereof, in which: the amino acid at Mutated site 1 is Leu, and the amino acid at Mutated site 5 is Met.

[0776] In another preferred embodiment, the mutated PPO comprises a sequence of SEQ ID NO: 1, 2, 3, 4, 5, 6, 7, 8, 9, 10, 11, 12, 13, 14, 15, 16, 17, 18, 19, 20, 21, 22, 23, 24, 25, 26, 27, 28, 29, 30, 31, 32, 33, 34, 35, 36, 37, 38, 39, 40, 41, 42, 43, 44, 45, 46, 47, 48, 49, 50, 51, 52, 53, 54, 55, 56, 57, 58, 59, 60, 61, 62, 63, 64, 65, 66, 67, 68, 69, 70, 71, 72, 73, 74, 75, 76, 77, 78, 79, 80, 81, 82, 83, 84, 85, 86, 87, 88, 89, 90, 91, 92, 93, 94, 95, 96, 97, 98, 99, 100, 101, 102, 103, 104, 105, 106, 107, 108, 109, 110, 111, 112, 113, 114, 115, 116, 117, 577, 579, 581, 583, 585, 587, 589, 591, 593, 595, 597, 599, 601, 603, 605, 607, 609, 611, 613, 615, 617, 619, 621, 623, 625, 627, or 637, a variant, derivative, orthologue, paralogue or homologue thereof, in which: the amino acid at Mutated site 1 is Ala, and the amino acid at Mutated site 5 is Ala.

[0777] In another preferred embodiment, the mutated PPO comprises a sequence of SEQ ID NO: 1, 2, 3, 4, 5, 6, 7, 8, 9, 10, 11, 12, 13, 14, 15, 16, 17, 18, 19, 20, 21, 22, 23, 24, 25, 26, 27, 28, 29, 30, 31, 32, 33, 34, 35, 36, 37, 38, 39, 40, 41, 42, 43, 44, 45, 46, 47, 48, 49, 50, 51, 52, 53, 54, 55, 56, 57, 58, 59, 60, 61, 62, 63, 64, 65, 66, 67, 68, 69, 70, 71, 72, 73, 74, 75, 76, 77, 78, 79, 80, 81, 82, 83, 84, 85, 86, 87, 88, 89, 90, 91, 92, 93, 94, 95, 96, 97, 98, 99, 100, 101, 102, 103, 104, 105, 106, 107, 108, 109, 110, 111, 112, 113, 114, 115, 116, 117, 577, 579, 581, 583, 585, 587, 589, 591, 593, 595, 597, 599, 601,603, 605, 607, 609, 611,613, 615, 617, 619, 621,623, 625, 627, or 637, a variant, derivative, orthologue, paralogue or homologue thereof, in which: the amino acid at Mutated site 1 is Ala, and the amino acid at Mutated site 5 is Leu.

[0778] In another preferred embodiment, the mutated PPO comprises a sequence of SEQ ID NO: 1, 2, 3, 4, 5, 6, 7, 8, 9, 10, 11, 12, 13, 14, 15, 16, 17, 18, 19, 20, 21, 22, 23, 24, 25, 26, 27, 28, 29, 30, 31, 32, 33, 34, 35, 36, 37, 38, 39, 40, 41, 42, 43, 44, 45, 46, 47, 48, 49, 50, 51, 52, 53, 54, 55, 56, 57, 58, 59, 60, 61, 62, 63, 64, 65, 66, 67, 68, 69, 70, 71, 72, 73, 74, 75, 76, 77, 78, 79, 80, 81, 82, 83, 84, 85, 86, 87, 88, 89, 90, 91, 92, 93, 94, 95, 96, 97, 98, 99, 100, 101, 102, 103, 104, 105, 106, 107, 108, 109, 110, 111, 112, 113, 114, 115, 116, 117, 577, 579, 581, 583, 585, 587, 589, 591, 593, 595, 597, 599, 601, 603, 605, 607, 609, 611, 613, 615, 617, 619, 621, 623, 625, 627, or 637, a variant, derivative, orthologue, paralogue or homologue thereof, in which: the amino acid at Mutated site 1 is Ala, and the amino acid at Mutated site 5 is Val.

[0779] In another preferred embodiment, the mutated PPO comprises a sequence of SEQ ID NO: 1, 2, 3, 4, 5, 6, 7, 8, 9, 10, 11, 12, 13, 14, 15, 16, 17, 18, 19, 20, 21, 22, 23, 24, 25, 26, 27, 28, 29, 30, 31, 32, 33, 34, 35, 36, 37, 38, 39, 40, 41, 42, 43, 44, 45, 46, 47, 48, 49, 50, 51, 52, 53, 54, 55, 56, 57, 58, 59, 60, 61, 62, 63, 64, 65, 66, 67, 68, 69, 70, 71, 72, 73, 74, 75, 76, 77, 78, 79, 80, 81, 82, 83, 84, 85, 86, 87, 88, 89, 90, 91, 92, 93, 94, 95, 96, 97, 98, 99, 100, 101, 102, 103, 104, 105, 106, 107, 108, 109, 110, 111, 112, 113, 114, 115, 116, 117, 577, 579, 581, 583, 585, 587, 589, 591, 593, 595, 597, 599, 601, 603, 605, 607, 609, 611, 613, 615, 617, 619, 621, 623, 625, 627, or 637, a variant, derivative, orthologue, paralogue or homologue thereof, in which: the amino acid at Mutated site 1 is Ala, and the amino acid at Mutated site 5 is Ile.

[0780] In another preferred embodiment, the mutated PPO comprises a sequence of SEQ ID NO: 1, 2, 3, 4, 5, 6, 7, 8, 9, 10, 11, 12, 13, 14, 15, 16, 17, 18, 19, 20, 21, 22, 23, 24, 25, 26, 27, 28, 29, 30, 31, 32, 33, 34, 35, 36, 37, 38, 39, 40, 41, 42, 43, 44, 45, 46, 47, 48, 49, 50, 51, 52, 53, 54, 55, 56, 57, 58, 59, 60, 61, 62, 63, 64, 65, 66, 67, 68, 69, 70, 71, 72, 73, 74, 75, 76, 77, 78, 79, 80, 81, 82, 83, 84, 85, 86, 87, 88, 89, 90, 91, 92, 93, 94, 95, 96, 97, 98, 99, 100, 101, 102, 103, 104, 105, 106, 107, 108, 109, 110, 111, 112, 113, 114, 115, 116, 117, 577, 579, 581, 583, 585, 587, 589, 591, 593, 595, 597, 599, 601, 603, 605, 607, 609, 611, 613, 615, 617, 619, 621, 623, 625, 627, or 637, a variant, derivative, orthologue, paralogue or homologue thereof, in which: the amino acid at Mutated site 1 is Ala, and the amino acid at Mutated site 5 is Met.

[0781] In another preferred embodiment, the mutated PPO comprises a sequence of SEQ ID NO: 1, 2, 3, 4, 5, 6, 7, 8, 9, 10, 11, 12, 13, 14, 15, 16, 17, 18, 19, 20, 21, 22, 23, 24, 25, 26, 27, 28, 29, 30, 31, 32, 33, 34, 35, 36, 37, 38, 39, 40, 41, 42, 43, 44, 45, 46, 47, 48, 49, 50, 51, 52, 53, 54, 55, 56, 57, 58, 59, 60, 61, 62, 63, 64, 65, 66, 67, 68, 69, 70, 71, 72, 73, 74, 75, 76, 77, 78, 79, 80, 81, 82, 83, 84, 85, 86, 87, 88, 89, 90, 91, 92, 93, 94, 95, 96, 97, 98, 99, 100, 101, 102, 103, 104, 105, 106, 107, 108, 109, 110, 111, 112, 113, 114, 115, 116, 117, 577, 579, 581, 583, 585, 587, 589, 591, 593, 595, 597, 599, 601,603, 605, 607, 609, 611,613, 615, 617, 619, 621,623, 625, 627, or 637, a variant, derivative, orthologue, paralogue or homologue thereof, in which: the amino acid at Mutated site 1 is Val, and the amino acid at Mutated site 5 is Ala.

[0782] In another preferred embodiment, the mutated PPO comprises a sequence of SEQ ID NO: 1, 2, 3, 4, 5, 6, 7, 8, 9, 10, 11, 12, 13, 14, 15, 16, 17, 18, 19, 20, 21, 22, 23, 24, 25, 26, 27, 28, 29, 30, 31, 32, 33, 34, 35, 36, 37, 38, 39, 40, 41, 42, 43, 44, 45, 46, 47, 48, 49, 50, 51, 52, 53, 54, 55, 56, 57, 58, 59, 60, 61, 62, 63, 64, 65, 66, 67, 68, 69, 70, 71, 72, 73, 74, 75, 76, 77, 78, 79, 80, 81, 82, 83, 84, 85, 86, 87, 88, 89, 90, 91, 92, 93, 94, 95, 96, 97, 98, 99, 100, 101, 102, 103, 104, 105, 106, 107, 108, 109, 110, 111, 112, 113, 114, 115, 116, 117, 577, 579, 581, 583, 585, 587, 589, 591, 593, 595, 597, 599, 601, 603, 605, 607, 609, 611, 613, 615, 617, 619, 621, 623, 625, 627, or 637, a variant, derivative, orthologue, paralogue or homologue thereof, in which: the amino acid at Mutated site 1 is Val, and the amino acid at Mutated site 5 is Leu.

[0783] In another preferred embodiment, the mutated PPO comprises a sequence of SEQ ID NO: 1, 2, 3, 4, 5, 6, 7, 8, 9, 10, 11, 12, 13, 14, 15, 16, 17, 18, 19, 20, 21, 22, 23, 24, 25, 26, 27, 28, 29, 30, 31, 32, 33, 34, 35, 36, 37, 38, 39, 40, 41, 42, 43, 44, 45, 46, 47, 48, 49, 50, 51, 52, 53, 54, 55, 56, 57, 58, 59, 60, 61, 62, 63, 64, 65, 66, 67, 68, 69, 70, 71, 72, 73, 74, 75, 76, 77, 78, 79, 80, 81, 82, 83, 84, 85, 86, 87, 88, 89, 90, 91, 92, 93, 94, 95, 96, 97, 98, 99, 100, 101, 102, 103, 104, 105, 106, 107, 108, 109, 110, 111, 112, 113, 114, 115, 116, 117, 577, 579, 581, 583, 585, 587, 589, 591, 593, 595, 597, 599, 601, 603, 605, 607, 609, 611, 613, 615, 617, 619, 621, 623, 625, 627, or 637, a variant, derivative, orthologue, paralogue or homologue thereof, in which: the amino acid at Mutated site 1 is Val, and the amino acid at Mutated site 5 is Val.

[0784] In another preferred embodiment, the mutated PPO comprises a sequence of SEQ ID NO: 1, 2, 3, 4, 5, 6, 7, 8, 9, 10, 11, 12, 13, 14, 15, 16, 17, 18, 19, 20, 21, 22, 23, 24, 25, 26, 27, 28, 29, 30, 31, 32, 33, 34, 35, 36, 37, 38, 39, 40, 41, 42, 43, 44, 45, 46, 47, 48, 49, 50, 51, 52, 53, 54, 55, 56, 57, 58, 59, 60, 61, 62, 63, 64, 65, 66, 67, 68, 69, 70, 71, 72, 73, 74, 75, 76, 77, 78, 79, 80, 81, 82, 83, 84, 85, 86, 87, 88, 89, 90, 91, 92, 93, 94, 95, 96, 97, 98, 99, 100, 101, 102, 103, 104, 105, 106, 107, 108, 109, 110, 111, 112, 113, 114, 115, 116, 117, 577, 579, 581, 583, 585, 587, 589, 591, 593, 595, 597, 599, 601, 603, 605, 607, 609, 611, 613, 615, 617, 619, 621, 623, 625, 627, or 637, a variant, derivative, orthologue, paralogue or homologue thereof, in which: the amino acid at Mutated site 1 is Val, and the amino acid at Mutated site 5 is Ile.

[0785] In another preferred embodiment, the mutated PPO comprises a sequence of SEQ ID NO: 1, 2, 3, 4, 5, 6, 7, 8, 9, 10, 11, 12, 13, 14, 15, 16, 17, 18, 19, 20, 21, 22, 23, 24, 25, 26, 27, 28, 29, 30, 31, 32, 33, 34, 35, 36, 37, 38, 39, 40, 41, 42, 43, 44, 45, 46, 47, 48, 49, 50, 51, 52, 53, 54, 55, 56, 57, 58, 59, 60, 61, 62, 63, 64, 65, 66, 67, 68, 69, 70, 71, 72, 73, 74, 75, 76, 77, 78, 79, 80, 81, 82, 83, 84, 85, 86, 87, 88, 89, 90, 91, 92, 93, 94, 95, 96, 97, 98, 99, 100, 101, 102, 103, 104, 105, 106, 107, 108, 109, 110, 111, 112, 113, 114, 115, 116, 117, 577, 579, 581, 583, 585, 587, 589, 591, 593, 595, 597, 599, 601, 603, 605, 607, 609, 611, 613, 615, 617, 619, 621, 623, 625, 627, or 637, a variant, derivative, orthologue, paralogue or homologue thereof, in which: the amino acid at Mutated site 1 is Val, and the amino acid at Mutated site 5 is Met.

[0786] In another preferred embodiment, the mutated PPO comprises a sequence of SEQ ID NO: 1, 2, 3, 4, 5, 6, 7, 8, 9, 10, 11, 12, 13, 14, 15, 16, 17, 18, 19, 20, 21, 22, 23, 24, 25, 26, 27, 28, 29, 30, 31, 32, 33, 34, 35, 36, 37, 38, 39, 40, 41, 42, 43, 44, 45, 46, 47, 48, 49, 50, 51, 52, 53, 54, 55, 56, 57, 58, 59, 60, 61, 62, 63, 64, 65, 66, 67, 68, 69, 70, 71, 72, 73, 74, 75, 76, 77, 78, 79, 80, 81, 82, 83, 84, 85, 86, 87, 88, 89, 90, 91, 92, 93, 94, 95, 96, 97, 98, 99, 100, 101, 102, 103, 104, 105, 106, 107, 108, 109, 110, 111, 112, 113, 114, 115, 116, 117, 577, 579, 581, 583, 585, 587, 589, 591, 593, 595, 597, 599, 601, 603, 605, 607, 609, 611, 613, 615, 617, 619, 621, 623, 625, 627, or 637, a variant, derivative, orthologue, paralogue or homologue thereof, in which: the amino acid at Mutated site 1 is Ile, and the amino acid at Mutated site 5 is Ala.

[0787] In another preferred embodiment, the mutated PPO comprises a sequence of SEQ ID NO: 1, 2, 3, 4, 5, 6, 7, 8, 9, 10, 11, 12, 13, 14, 15, 16, 17, 18, 19, 20, 21, 22, 23, 24, 25, 26, 27, 28, 29, 30, 31, 32, 33, 34, 35, 36, 37, 38, 39, 40, 41, 42, 43, 44, 45, 46, 47, 48, 49, 50, 51, 52, 53, 54, 55, 56, 57, 58, 59, 60, 61, 62, 63, 64, 65, 66, 67, 68, 69, 70, 71, 72, 73, 74, 75, 76, 77, 78, 79, 80, 81, 82, 83, 84, 85, 86, 87, 88, 89, 90, 91, 92, 93, 94, 95, 96, 97, 98, 99, 100, 101, 102, 103, 104, 105, 106, 107, 108, 109, 110, 111, 112, 113, 114, 115, 116, 117, 577, 579, 581, 583, 585, 587, 589, 591, 593, 595, 597, 599, 601, 603, 605, 607, 609, 611, 613, 615, 617, 619, 621, 623, 625, 627, or 637, a variant, derivative, orthologue, paralogue or homologue thereof, in which: the amino acid at Mutated site 1 is Ile, and the amino acid at Mutated site 5 is Leu.

[0788] In another preferred embodiment, the mutated PPO comprises a sequence of SEQ ID NO: 1, 2, 3, 4, 5, 6, 7, 8, 9, 10, 11, 12, 13, 14, 15, 16, 17, 18, 19, 20, 21, 22, 23, 24, 25, 26, 27, 28, 29, 30, 31, 32, 33, 34, 35, 36, 37, 38, 39, 40, 41, 42, 43, 44, 45, 46, 47, 48, 49, 50, 51, 52, 53, 54, 55, 56, 57, 58, 59, 60, 61, 62, 63, 64, 65, 66, 67, 68, 69, 70, 71, 72, 73, 74, 75, 76, 77, 78, 79, 80, 81, 82, 83, 84, 85, 86, 87, 88, 89, 90, 91, 92, 93, 94, 95, 96, 97, 98, 99, 100, 101, 102, 103, 104, 105, 106, 107, 108, 109, 110, 111, 112, 113, 114, 115, 116, 117, 577, 579, 581, 583, 585, 587, 589, 591, 593, 595, 597, 599, 601, 603, 605, 607, 609, 611, 613, 615, 617, 619, 621, 623, 625, 627, or 637, a variant, derivative, orthologue, paralogue or homologue thereof, in which: the amino acid at Mutated site 1 is Ile, and the amino acid at Mutated site 5 is Val.

[0789] In another preferred embodiment, the mutated PPO comprises a sequence of SEQ ID NO: 1, 2, 3, 4, 5, 6, 7, 8, 9, 10, 11, 12, 13, 14, 15, 16, 17, 18, 19, 20, 21, 22, 23, 24, 25, 26, 27, 28, 29, 30, 31, 32, 33, 34, 35, 36, 37, 38, 39, 40, 41, 42, 43, 44, 45, 46, 47, 48, 49, 50, 51, 52, 53, 54, 55, 56, 57, 58, 59, 60, 61, 62, 63, 64, 65, 66, 67, 68, 69, 70, 71, 72, 73, 74, 75, 76, 77, 78, 79, 80, 81, 82, 83, 84, 85, 86, 87, 88, 89, 90, 91, 92, 93, 94, 95, 96, 97, 98, 99, 100, 101, 102, 103, 104, 105, 106, 107, 108, 109, 110, 111, 112, 113, 114, 115, 116, 117, 577, 579, 581, 583, 585, 587, 589, 591, 593, 595, 597, 599, 601, 603, 605, 607, 609, 611, 613, 615, 617, 619, 621, 623, 625, 627, or 637, a variant, derivative, orthologue, paralogue or homologue thereof, in which: the amino acid at Mutated site 1 is Ile, and the amino acid at Mutated site 5 is Ile.

[0790] In another preferred embodiment, the mutated PPO comprises a sequence of SEQ ID NO: 1, 2, 3, 4, 5, 6, 7, 8, 9, 10, 11, 12, 13, 14, 15, 16, 17, 18, 19, 20, 21, 22, 23, 24, 25, 26, 27, 28, 29, 30, 31, 32, 33, 34, 35, 36, 37, 38, 39, 40, 41, 42, 43, 44, 45, 46, 47, 48, 49, 50, 51, 52, 53, 54, 55, 56, 57, 58, 59, 60, 61, 62, 63, 64, 65, 66, 67, 68, 69, 70, 71, 72, 73, 74, 75, 76, 77, 78, 79, 80, 81, 82, 83, 84, 85, 86, 87, 88, 89, 90, 91, 92, 93, 94, 95, 96, 97, 98, 99, 100, 101, 102, 103, 104, 105, 106, 107, 108, 109, 110, 111, 112, 113, 114, 115, 116, 117, 577, 579, 581, 583, 585, 587, 589, 591, 593, 595, 597, 599, 601, 603, 605, 607, 609, 611, 613, 615, 617, 619, 621, 623, 625, 627, or 637, a variant, derivative, orthologue, paralogue or homologue thereof, in which: the amino acid at Mutated site 1 is Ile, and the amino acid at Mutated site 5 is Met.

[0791] In another preferred embodiment, the mutated PPO comprises a sequence of SEQ ID NO: 1, 2, 3, 4, 5, 6, 7, 8, 9, 10, 11, 12, 13, 14, 15, 16, 17, 18, 19, 20, 21, 22, 23, 24, 25, 26, 27, 28, 29, 30, 31, 32, 33, 34, 35, 36, 37, 38, 39, 40, 41, 42, 43, 44, 45, 46, 47, 48, 49, 50, 51, 52, 53, 54, 55, 56, 57, 58, 59, 60, 61, 62, 63, 64, 65, 66, 67, 68, 69, 70, 71, 72, 73, 74, 75, 76, 77, 78, 79, 80, 81, 82, 83, 84, 85, 86, 87, 88, 89, 90, 91, 92, 93, 94, 95, 96, 97, 98, 99, 100, 101, 102, 103, 104, 105, 106, 107, 108, 109, 110, 111, 112, 113, 114, 115, 116, 117, 577, 579, 581, 583, 585, 587, 589, 591, 593, 595, 597, 599, 601, 603, 605, 607, 609, 611, 613, 615, 617, 619, 621, 623, 625, 627, or 637, a variant, derivative, orthologue, paralogue or homologue thereof, in which: the amino acid at Mutated site 1 is Met, and the amino acid at Mutated site 5 is Ala.

[0792] In another preferred embodiment, the mutated PPO comprises a sequence of SEQ ID NO: 1, 2, 3, 4, 5, 6, 7, 8, 9, 10, 11, 12, 13, 14, 15, 16, 17, 18, 19, 20, 21, 22, 23, 24, 25, 26, 27, 28, 29, 30, 31, 32, 33, 34, 35, 36, 37, 38, 39, 40, 41, 42, 43, 44, 45, 46, 47, 48, 49, 50, 51, 52, 53, 54, 55, 56, 57, 58, 59, 60, 61, 62, 63, 64, 65, 66, 67, 68, 69, 70, 71, 72, 73, 74, 75, 76, 77, 78, 79, 80, 81, 82, 83, 84, 85, 86, 87, 88, 89, 90, 91, 92, 93, 94, 95, 96, 97, 98, 99, 100, 101, 102, 103, 104, 105, 106, 107, 108, 109, 110, 111, 112, 113, 114, 115, 116, 117, 577, 579, 581, 583, 585, 587, 589, 591, 593, 595, 597, 599, 601, 603, 605, 607, 609, 611, 613, 615, 617, 619, 621, 623, 625, 627, or 637, a variant, derivative, orthologue, paralogue or homologue thereof, in which: the amino acid at Mutated site 1 is Met, and the amino acid at Mutated site 5 is Leu.

[0793] In another preferred embodiment, the mutated PPO comprises a sequence of SEQ ID NO: 1, 2, 3, 4, 5, 6, 7, 8, 9, 10, 11, 12, 13, 14, 15, 16, 17, 18, 19, 20, 21, 22, 23, 24, 25, 26, 27, 28, 29, 30, 31, 32, 33, 34, 35, 36, 37, 38, 39, 40, 41, 42, 43, 44, 45, 46, 47, 48, 49, 50, 51, 52, 53, 54, 55, 56, 57, 58, 59, 60, 61, 62, 63, 64, 65, 66, 67, 68, 69, 70, 71, 72, 73, 74, 75, 76, 77, 78, 79, 80, 81, 82, 83, 84, 85, 86, 87, 88, 89, 90, 91, 92, 93, 94, 95, 96, 97, 98, 99, 100, 101, 102, 103, 104, 105, 106, 107, 108, 109, 110, 111, 112, 113, 114, 115, 116, 117, 577, 579, 581, 583, 585, 587, 589, 591, 593, 595, 597, 599, 601, 603, 605, 607, 609, 611, 613, 615, 617, 619, 621, 623, 625, 627, or 637, a variant, derivative, orthologue, paralogue or homologue thereof, in which: the amino acid at Mutated site 1 is Met, and the amino acid at Mutated site 5 is Val.

[0794] In another preferred embodiment, the mutated PPO comprises a sequence of SEQ ID NO: 1, 2, 3, 4, 5, 6, 7, 8, 9, 10, 11, 12, 13, 14, 15, 16, 17, 18, 19, 20, 21, 22, 23, 24, 25, 26, 27, 28, 29, 30, 31, 32, 33, 34, 35, 36, 37, 38, 39, 40, 41, 42, 43, 44, 45, 46, 47, 48, 49, 50, 51, 52, 53, 54, 55, 56, 57, 58, 59, 60, 61, 62, 63, 64, 65, 66, 67, 68, 69, 70, 71, 72, 73, 74, 75, 76, 77, 78, 79, 80, 81, 82, 83, 84, 85, 86, 87, 88, 89, 90, 91, 92, 93, 94, 95, 96, 97, 98, 99, 100, 101, 102, 103, 104, 105, 106, 107, 108, 109, 110, 111, 112, 113, 114, 115, 116, 117, 577, 579, 581, 583, 585, 587, 589, 591, 593, 595, 597, 599, 601, 603, 605, 607, 609, 611, 613, 615, 617, 619, 621, 623, 625, 627, or 637, a variant, derivative, orthologue, paralogue or homologue thereof, in which: the amino acid at Mutated site 1 is Met, and the amino acid at Mutated site 5 is Ile.

[0795] In another preferred embodiment, the mutated PPO comprises a sequence of SEQ ID NO: 1, 2, 3, 4, 5, 6, 7, 8, 9, 10, 11, 12, 13, 14, 15, 16, 17, 18, 19, 20, 21, 22, 23, 24, 25, 26, 27, 28, 29, 30, 31, 32, 33, 34, 35, 36, 37, 38, 39, 40, 41, 42, 43, 44, 45, 46, 47, 48, 49, 50, 51, 52, 53, 54, 55, 56, 57, 58, 59, 60, 61, 62, 63, 64, 65, 66, 67, 68, 69, 70, 71, 72, 73, 74, 75, 76, 77, 78, 79, 80, 81, 82, 83, 84, 85, 86, 87, 88, 89, 90, 91, 92, 93, 94, 95, 96, 97, 98, 99, 100, 101, 102, 103, 104, 105, 106, 107, 108, 109, 110, 111, 112, 113, 114, 115, 116, 117, 577, 579, 581, 583, 585, 587, 589, 591, 593, 595, 597, 599, 601, 603, 605, 607, 609, 611, 613, 615, 617, 619, 621, 623, 625, 627, or 637, a variant, derivative, orthologue, paralogue or homologue thereof, in which: the amino acid at Mutated site 1 is Met, and the amino acid at Mutated site 5 is Met.

[0796] In another preferred embodiment, the mutated PPO comprises a sequence of SEQ ID NO: 1, 2, 3, 4, 5, 6, 7, 8, 9, 10, 11, 12, 13, 14, 15, 16, 17, 18, 19, 20, 21, 22, 23, 24, 25, 26, 27, 28, 29, 30, 31, 32, 33, 34, 35, 36, 37, 38, 39, 40, 41, 42, 43, 44, 45, 46, 47, 48, 49, 50, 51, 52, 53, 54, 55, 56, 57, 58, 59, 60, 61, 62, 63, 64, 65, 66, 67, 68, 69, 70, 71, 72, 73, 74, 75, 76, 77, 78, 79, 80, 81, 82, 83, 84, 85, 86, 87, 88, 89, 90, 91, 92, 93, 94, 95, 96, 97, 98, 99, 100, 101, 102, 103, 104, 105, 106, 107, 108, 109, 110, 111, 112, 113, 114, 115, 116, 117, 577, 579, 581, 583, 585, 587, 589, 591, 593, 595, 597, 599, 601, 603, 605, 607, 609, 611, 613, 615, 617, 619, 621, 623, 625, 627, or 637, a variant, derivative, orthologue, paralogue or homologue thereof, in which: the amino acid at Mutated site 1 is Tyr, and the amino acid at Mutated site 5 is Ala.

[0797] In another preferred embodiment, the mutated PPO comprises a sequence of SEQ ID NO: 1, 2, 3, 4, 5, 6, 7, 8, 9, 10, 11, 12, 13, 14, 15, 16, 17, 18, 19, 20, 21, 22, 23, 24, 25, 26, 27, 28, 29, 30, 31, 32, 33, 34, 35, 36, 37, 38, 39, 40, 41, 42, 43, 44, 45, 46, 47, 48, 49, 50, 51, 52, 53, 54, 55, 56, 57, 58, 59, 60, 61, 62, 63, 64, 65, 66, 67, 68, 69, 70, 71, 72, 73, 74, 75, 76, 77, 78, 79, 80, 81, 82, 83, 84, 85, 86, 87, 88, 89, 90, 91, 92, 93, 94, 95, 96, 97, 98, 99, 100, 101, 102, 103, 104, 105, 106, 107, 108, 109, 110, 111, 112, 113, 114, 115, 116, 117, 577, 579, 581, 583, 585, 587, 589, 591, 593, 595, 597, 599, 601, 603, 605, 607, 609, 611, 613, 615, 617, 619, 621, 623, 625, 627, or 637, a variant, derivative, orthologue, paralogue or homologue thereof, in which: the amino acid at Mutated site 1 is Tyr, and the amino acid at Mutated site 5 is Leu.

[0798] In another preferred embodiment, the mutated PPO comprises a sequence of SEQ ID NO: 1, 2, 3, 4, 5, 6, 7, 8, 9, 10, 11, 12, 13, 14, 15, 16, 17, 18, 19, 20, 21, 22, 23, 24, 25, 26, 27, 28, 29, 30, 31, 32, 33, 34, 35, 36, 37, 38, 39, 40, 41, 42, 43, 44, 45, 46, 47, 48, 49, 50, 51, 52, 53, 54, 55, 56, 57, 58, 59, 60, 61, 62, 63, 64, 65, 66, 67, 68, 69, 70, 71, 72, 73, 74, 75, 76, 77, 78, 79, 80, 81, 82, 83, 84, 85, 86, 87, 88, 89, 90, 91, 92, 93, 94, 95, 96, 97, 98, 99, 100, 101, 102, 103, 104, 105, 106, 107, 108, 109, 110, 111, 112, 113, 114, 115, 116, 117, 577, 579, 581, 583, 585, 587, 589, 591, 593, 595, 597, 599, 601, 603, 605, 607, 609, 611, 613, 615, 617, 619, 621, 623, 625, 627, or 637, a variant, derivative, orthologue, paralogue or homologue thereof, in which: the amino acid at Mutated site 1 is Tyr, and the amino acid at Mutated site 5 is Val.

[0799] In another preferred embodiment, the mutated PPO comprises a sequence of SEQ ID NO: 1, 2, 3, 4, 5, 6, 7, 8, 9, 10, 11, 12, 13, 14, 15, 16, 17, 18, 19, 20, 21, 22, 23, 24, 25, 26, 27, 28, 29, 30, 31, 32, 33, 34, 35, 36, 37, 38, 39, 40, 41, 42, 43, 44, 45, 46, 47, 48, 49, 50, 51, 52, 53, 54, 55, 56, 57, 58, 59, 60, 61, 62, 63, 64, 65, 66, 67, 68, 69, 70, 71, 72, 73, 74, 75, 76, 77, 78, 79, 80, 81, 82, 83, 84, 85, 86, 87, 88, 89, 90, 91, 92, 93, 94, 95, 96, 97, 98, 99, 100, 101, 102, 103, 104, 105, 106, 107, 108, 109, 110, 111, 112, 113, 114, 115, 116, 117, 577, 579, 581, 583, 585, 587, 589, 591, 593, 595, 597, 599, 601, 603, 605, 607, 609, 611, 613, 615, 617, 619, 621, 623, 625, 627, or 637, a variant, derivative, orthologue, paralogue or homologue thereof, in which: the amino acid at Mutated site 1 is Tyr, and the amino acid at Mutated site 5 is Ile.

[0800] In another preferred embodiment, the mutated PPO comprises a sequence of SEQ ID NO: 1, 2, 3, 4, 5, 6, 7, 8, 9, 10, 11, 12, 13, 14, 15, 16, 17, 18, 19, 20, 21, 22, 23, 24, 25, 26, 27, 28, 29, 30, 31, 32, 33, 34, 35, 36, 37, 38, 39, 40, 41, 42, 43, 44, 45, 46, 47, 48, 49, 50, 51, 52, 53, 54, 55, 56, 57, 58, 59, 60, 61, 62, 63, 64, 65, 66, 67, 68, 69, 70, 71, 72, 73, 74, 75, 76, 77, 78, 79, 80, 81, 82, 83, 84, 85, 86, 87, 88, 89, 90, 91, 92, 93, 94, 95, 96, 97, 98, 99, 100, 101, 102, 103, 104, 105, 106, 107, 108, 109, 110, 111, 112, 113, 114, 115, 116, 117, 577, 579, 581, 583, 585, 587, 589, 591, 593, 595, 597, 599, 601, 603, 605, 607, 609, 611, 613, 615, 617, 619, 621, 623, 625, 627, or 637, a variant, derivative, orthologue, paralogue or homologue thereof, in which: the amino acid at Mutated site 1 is Tyr, and the amino acid at Mutated site 5 is Met.

[0801] In another preferred embodiment, the mutated PPO comprises a sequence of SEQ ID NO: 1, 2, 3, 4, 5, 6, 7, 8, 9, 10, 11, 12, 13, 14, 15, 16, 17, 18, 19, 20, 21, 22, 23, 24, 25, 26, 27, 28, 29, 30, 31, 32, 33, 34, 35, 36, 37, 38, 39, 40, 41, 42, 43, 44, 45, 46, 47, 48, 49, 50, 51, 52, 53, 54, 55, 56, 57, 58, 59, 60, 61, 62, 63, 64, 65, 66, 67, 68, 69, 70, 71, 72, 73, 74, 75, 76, 77, 78, 79, 80, 81, 82, 83, 84, 85, 86, 87, 88, 89, 90, 91, 92, 93, 94, 95, 96, 97, 98, 99, 100, 101, 102, 103, 104, 105, 106, 107, 108, 109, 110, 111, 112, 113, 114, 115, 116, 117, 577, 579, 581, 583, 585, 587, 589, 591, 593, 595, 597, 599, 601,603, 605, 607, 609, 611,613, 615, 617, 619, 621,623, 625, 627, or 637, a variant, derivative, orthologue, paralogue or homologue thereof, in which: the amino acid at Mutated site 1 is Gly, and the amino acid at Mutated site 5 is Ala.

[0802] In another preferred embodiment, the mutated PPO comprises a sequence of SEQ ID NO: 1, 2, 3, 4, 5, 6, 7, 8, 9, 10, 11, 12, 13, 14, 15, 16, 17, 18, 19, 20, 21, 22, 23, 24, 25, 26, 27, 28, 29, 30, 31, 32, 33, 34, 35, 36, 37, 38, 39, 40, 41, 42, 43, 44, 45, 46, 47, 48, 49, 50, 51, 52, 53, 54, 55, 56, 57, 58, 59, 60, 61, 62, 63, 64, 65, 66, 67, 68, 69, 70, 71, 72, 73, 74, 75, 76, 77, 78, 79, 80, 81, 82, 83, 84, 85, 86, 87, 88, 89, 90, 91, 92, 93, 94, 95, 96, 97, 98, 99, 100, 101, 102, 103, 104, 105, 106, 107, 108, 109, 110, 111, 112, 113, 114, 115, 116, 117, 577, 579, 581, 583, 585, 587, 589, 591, 593, 595, 597, 599, 601, 603, 605, 607, 609, 611, 613, 615, 617, 619, 621, 623, 625, 627, or 637, a variant, derivative, orthologue, paralogue or homologue thereof, in which: the amino acid at Mutated site 1 is Gly, and the amino acid at Mutated site 5 is Leu.

[0803] In another preferred embodiment, the mutated PPO comprises a sequence of SEQ ID NO: 1, 2, 3, 4, 5, 6, 7, 8, 9, 10, 11, 12, 13, 14, 15, 16, 17, 18, 19, 20, 21, 22, 23, 24, 25, 26, 27, 28, 29, 30, 31, 32, 33, 34, 35, 36, 37, 38, 39, 40, 41, 42, 43, 44, 45, 46, 47, 48, 49, 50, 51, 52, 53, 54, 55, 56, 57, 58, 59, 60, 61, 62, 63, 64, 65, 66, 67, 68, 69, 70, 71, 72, 73, 74, 75, 76, 77, 78, 79, 80, 81, 82, 83, 84, 85, 86, 87, 88, 89, 90, 91, 92, 93, 94, 95, 96, 97, 98, 99, 100, 101, 102, 103, 104, 105, 106, 107, 108, 109, 110, 111, 112, 113, 114, 115, 116, 117, 577, 579, 581, 583, 585, 587, 589, 591, 593, 595, 597, 599, 601, 603, 605, 607, 609, 611, 613, 615, 617, 619, 621, 623, 625, 627, or 637, a variant, derivative, orthologue, paralogue or homologue thereof, in which: the amino acid at Mutated site 1 is Gly, and the amino acid at Mutated site 5 is Val.

[0804] In another preferred embodiment, the mutated PPO comprises a sequence of SEQ ID NO: 1, 2, 3, 4, 5, 6, 7, 8, 9, 10, 11, 12, 13, 14, 15, 16, 17, 18, 19, 20, 21, 22, 23, 24, 25, 26, 27, 28, 29, 30, 31, 32, 33, 34, 35, 36, 37, 38, 39, 40, 41, 42, 43, 44, 45, 46, 47, 48, 49, 50, 51, 52, 53, 54, 55, 56, 57, 58, 59, 60, 61, 62, 63, 64, 65, 66, 67, 68, 69, 70, 71, 72, 73, 74, 75, 76, 77, 78, 79, 80, 81, 82, 83, 84, 85, 86, 87, 88, 89, 90, 91, 92, 93, 94, 95, 96, 97, 98, 99, 100, 101, 102, 103, 104, 105, 106, 107, 108, 109, 110, 111, 112, 113, 114, 115, 116, 117, 577, 579, 581, 583, 585, 587, 589, 591, 593, 595, 597, 599, 601, 603, 605, 607, 609, 611, 613, 615, 617, 619, 621, 623, 625, 627, or 637, a variant, derivative, orthologue, paralogue or homologue thereof, in which: the amino acid at Mutated site 1 is Gly, and the amino acid at Mutated site 5 is Ile.

[0805] In another preferred embodiment, the mutated PPO comprises a sequence of SEQ ID NO: 1, 2, 3, 4, 5, 6, 7, 8, 9, 10, 11, 12, 13, 14, 15, 16, 17, 18, 19, 20, 21, 22, 23, 24, 25, 26, 27, 28, 29, 30, 31, 32, 33, 34, 35, 36, 37, 38, 39, 40, 41, 42, 43, 44, 45, 46, 47, 48, 49, 50, 51, 52, 53, 54, 55, 56, 57, 58, 59, 60, 61, 62, 63, 64, 65, 66, 67, 68, 69, 70, 71, 72, 73, 74, 75, 76, 77, 78, 79, 80, 81, 82, 83, 84, 85, 86, 87, 88, 89, 90, 91, 92, 93, 94, 95, 96, 97, 98, 99, 100, 101, 102, 103, 104, 105, 106, 107, 108, 109, 110, 111, 112, 113, 114, 115, 116, 117, 577, 579, 581, 583, 585, 587, 589, 591, 593, 595, 597, 599, 601, 603, 605, 607, 609, 611, 613, 615, 617, 619, 621, 623, 625, 627, or 637, a variant, derivative, orthologue, paralogue or homologue thereof, in which: the amino acid at Mutated site 1 is Gly, and the amino acid at Mutated site 5 is Met.

[0806] In another preferred embodiment, the mutated PPO comprises a sequence of SEQ ID NO: 1, 2, 3, 4, 5, 6, 7, 8, 9, 10, 11, 12, 13, 14, 15, 16, 17, 18, 19, 20, 21, 22, 23, 24, 25, 26, 27, 28, 29, 30, 31, 32, 33, 34, 35, 36, 37, 38, 39, 40, 41, 42, 43, 44, 45, 46, 47, 48, 49, 50, 51, 52, 53, 54, 55, 56, 57, 58, 59, 60, 61, 62, 63, 64, 65, 66, 67, 68, 69, 70, 71, 72, 73, 74, 75, 76, 77, 78, 79, 80, 81, 82, 83, 84, 85, 86, 87, 88, 89, 90, 91, 92, 93, 94, 95, 96, 97, 98, 99, 100, 101, 102, 103, 104, 105, 106, 107, 108, 109, 110, 111, 112, 113, 114, 115, 116, 117, 577, 579, 581, 583, 585, 587, 589, 591, 593, 595, 597, 599, 601, 603, 605, 607, 609, 611, 613, 615, 617, 619, 621, 623, 625, 627, or 637, a variant, derivative, orthologue, paralogue or homologue thereof, in which: the amino acid at Mutated site 1 is Asn, and the amino acid at Mutated site 5 is Ala.

[0807] In another preferred embodiment, the mutated PPO comprises a sequence of SEQ ID NO: 1, 2, 3, 4, 5, 6, 7, 8, 9, 10, 11, 12, 13, 14, 15, 16, 17, 18, 19, 20, 21, 22, 23, 24, 25, 26, 27, 28, 29, 30, 31, 32, 33, 34, 35, 36, 37, 38, 39, 40, 41, 42, 43, 44, 45, 46, 47, 48, 49, 50, 51, 52, 53, 54, 55, 56, 57, 58, 59, 60, 61, 62, 63, 64, 65, 66, 67, 68, 69, 70, 71, 72, 73, 74, 75, 76, 77, 78, 79, 80, 81, 82, 83, 84, 85, 86, 87, 88, 89, 90, 91, 92, 93, 94, 95, 96, 97, 98, 99, 100, 101, 102, 103, 104, 105, 106, 107, 108, 109, 110, 111, 112, 113, 114, 115, 116, 117, 577, 579, 581, 583, 585, 587, 589, 591, 593, 595, 597, 599, 601, 603, 605, 607, 609, 611, 613, 615, 617, 619, 621, 623, 625, 627, or 637, a variant, derivative, orthologue, paralogue or homologue thereof, in which: the amino acid at Mutated site 1 is Asn, and the amino acid at Mutated site 5 is Leu.

[0808] In another preferred embodiment, the mutated PPO comprises a sequence of SEQ ID NO: 1, 2, 3, 4, 5, 6, 7, 8, 9, 10, 11, 12, 13, 14, 15, 16, 17, 18, 19, 20, 21, 22, 23, 24, 25, 26, 27, 28, 29, 30, 31, 32, 33, 34, 35, 36, 37, 38, 39, 40, 41, 42, 43, 44, 45, 46, 47, 48, 49, 50, 51, 52, 53, 54, 55, 56, 57, 58, 59, 60, 61, 62, 63, 64, 65, 66, 67, 68, 69, 70, 71, 72, 73, 74, 75, 76, 77, 78, 79, 80, 81, 82, 83, 84, 85, 86, 87, 88, 89, 90, 91, 92, 93, 94, 95, 96, 97, 98, 99, 100, 101, 102, 103, 104, 105, 106, 107, 108, 109, 110, 111, 112, 113, 114, 115, 116, 117, 577, 579, 581, 583, 585, 587, 589, 591, 593, 595, 597, 599, 601, 603, 605, 607, 609, 611, 613, 615, 617, 619, 621, 623, 625, 627, or 637, a variant, derivative, orthologue, paralogue or homologue thereof, in which: the amino acid at Mutated site 1 is Asn, and the amino acid at Mutated site 5 is Val.

[0809] In another preferred embodiment, the mutated PPO comprises a sequence of SEQ ID NO: 1, 2, 3, 4, 5, 6, 7, 8, 9, 10, 11, 12, 13, 14, 15, 16, 17, 18, 19, 20, 21, 22, 23, 24, 25, 26, 27, 28, 29, 30, 31, 32, 33, 34, 35, 36, 37, 38, 39, 40, 41, 42, 43, 44, 45, 46, 47, 48, 49, 50, 51, 52, 53, 54, 55, 56, 57, 58, 59, 60, 61, 62, 63, 64, 65, 66, 67, 68, 69, 70, 71, 72, 73, 74, 75, 76, 77, 78, 79, 80, 81, 82, 83, 84, 85, 86, 87, 88, 89, 90, 91, 92, 93, 94, 95, 96, 97, 98, 99, 100, 101, 102, 103, 104, 105, 106, 107, 108, 109, 110, 111, 112, 113, 114, 115, 116, 117, 577, 579, 581, 583, 585, 587, 589, 591, 593, 595, 597, 599, 601, 603, 605, 607, 609, 611, 613, 615, 617, 619, 621, 623, 625, 627, or 637, a variant, derivative, orthologue, paralogue or homologue thereof, in which: the amino acid at Mutated site 1 is Asn, and the amino acid at Mutated site 5 is Ile.

[0810] In another preferred embodiment, the mutated PPO comprises a sequence of SEQ ID NO: 1, 2, 3, 4, 5, 6, 7, 8, 9, 10, 11, 12, 13, 14, 15, 16, 17, 18, 19, 20, 21, 22, 23, 24, 25, 26, 27, 28, 29, 30, 31, 32, 33, 34, 35, 36, 37, 38, 39, 40, 41, 42, 43, 44, 45, 46, 47, 48, 49, 50, 51, 52, 53, 54, 55, 56, 57, 58, 59, 60, 61, 62, 63, 64, 65, 66, 67, 68, 69, 70, 71, 72, 73, 74, 75, 76, 77, 78, 79, 80, 81, 82, 83, 84, 85, 86, 87, 88, 89, 90, 91, 92, 93, 94, 95, 96, 97, 98, 99, 100, 101, 102, 103, 104, 105, 106, 107, 108, 109, 110, 111, 112, 113, 114, 115, 116, 117, 577, 579, 581, 583, 585, 587, 589, 591, 593, 595, 597, 599, 601,603, 605, 607, 609, 611,613, 615, 617, 619, 621,623, 625, 627, or 637, a variant, derivative, orthologue, paralogue or homologue thereof, in which: the amino acid at Mutated site 1 is Asn, and the amino acid at Mutated site 5 is Met.

[0811] In another preferred embodiment, the mutated PPO comprises a sequence of SEQ ID NO: 1, 2, 3, 4, 5, 6, 7, 8, 9, 10, 11, 12, 13, 14, 15, 16, 17, 18, 19, 20, 21, 22, 23, 24, 25, 26, 27, 28, 29, 30, 31, 32, 33, 34, 35, 36, 37, 38, 39, 40, 41, 42, 43, 44, 45, 46, 47, 48, 49, 50, 51, 52, 53, 54, 55, 56, 57, 58, 59, 60, 61, 62, 63, 64, 65, 66, 67, 68, 69, 70, 71, 72, 73, 74, 75, 76, 77, 78, 79, 80, 81, 82, 83, 84, 85, 86, 87, 88, 89, 90, 91, 92, 93, 94, 95, 96, 97, 98, 99, 100, 101, 102, 103, 104, 105, 106, 107, 108, 109, 110, 111, 112, 113, 114, 115, 116, 117, 577, 579, 581, 583, 585, 587, 589, 591, 593, 595, 597, 599, 601, 603, 605, 607, 609, 611, 613, 615, 617, 619, 621, 623, 625, 627, or 637, a variant, derivative, orthologue, paralogue or homologue thereof, in which: the amino acid at Mutated site 1 is Cys, and the amino acid at Mutated site 5 is Ala.

[0812] In another preferred embodiment, the mutated PPO comprises a sequence of SEQ ID NO: 1, 2, 3, 4, 5, 6, 7, 8, 9, 10, 11, 12, 13, 14, 15, 16, 17, 18, 19, 20, 21, 22, 23, 24, 25, 26, 27, 28, 29, 30, 31, 32, 33, 34, 35, 36, 37, 38, 39, 40, 41, 42, 43, 44, 45, 46, 47, 48, 49, 50, 51, 52, 53, 54, 55, 56, 57, 58, 59, 60, 61, 62, 63, 64, 65, 66, 67, 68, 69, 70, 71, 72, 73, 74, 75, 76, 77, 78, 79, 80, 81, 82, 83, 84, 85, 86, 87, 88, 89, 90, 91, 92, 93, 94, 95, 96, 97, 98, 99, 100, 101, 102, 103, 104, 105, 106, 107, 108, 109, 110, 111, 112, 113, 114, 115, 116, 117, 577, 579, 581, 583, 585, 587, 589, 591, 593, 595, 597, 599, 601, 603, 605, 607, 609, 611, 613, 615, 617, 619, 621, 623, 625, 627, or 637, a variant, derivative, orthologue, paralogue or homologue thereof, in which: the amino acid at Mutated site 1 is Cys, and the amino acid at Mutated site 5 is Leu.

[0813] In another preferred embodiment, the mutated PPO comprises a sequence of SEQ ID NO: 1, 2, 3, 4, 5, 6, 7, 8, 9, 10, 11, 12, 13, 14, 15, 16, 17, 18, 19, 20, 21, 22, 23, 24, 25, 26, 27, 28, 29, 30, 31, 32, 33, 34, 35, 36, 37, 38, 39, 40, 41, 42, 43, 44, 45, 46, 47, 48, 49, 50, 51, 52, 53, 54, 55, 56, 57, 58, 59, 60, 61, 62, 63, 64, 65, 66, 67, 68, 69, 70, 71, 72, 73, 74, 75, 76, 77, 78, 79, 80, 81, 82, 83, 84, 85, 86, 87, 88, 89, 90, 91, 92, 93, 94, 95, 96, 97, 98, 99, 100, 101, 102, 103, 104, 105, 106, 107, 108, 109, 110, 111, 112, 113, 114, 115, 116, 117, 577, 579, 581, 583, 585, 587, 589, 591, 593, 595, 597, 599, 601, 603, 605, 607, 609, 611, 613, 615, 617, 619, 621, 623, 625, 627, or 637, a variant, derivative, orthologue, paralogue or homologue thereof, in which: the amino acid at Mutated site 1 is Cys, and the amino acid at Mutated site 5 is Val.

[0814] In another preferred embodiment, the mutated PPO comprises a sequence of SEQ ID NO: 1, 2, 3, 4, 5, 6, 7, 8, 9, 10, 11, 12, 13, 14, 15, 16, 17, 18, 19, 20, 21, 22, 23, 24, 25, 26, 27, 28, 29, 30, 31, 32, 33, 34, 35, 36, 37, 38, 39, 40, 41, 42, 43, 44, 45, 46, 47, 48, 49, 50, 51, 52, 53, 54, 55, 56, 57, 58, 59, 60, 61, 62, 63, 64, 65, 66, 67, 68, 69, 70, 71, 72, 73, 74, 75, 76, 77, 78, 79, 80, 81, 82, 83, 84, 85, 86, 87, 88, 89, 90, 91, 92, 93, 94, 95, 96, 97, 98, 99, 100, 101, 102, 103, 104, 105, 106, 107, 108, 109, 110, 111, 112, 113, 114, 115, 116, 117, 577, 579, 581, 583, 585, 587, 589, 591, 593, 595, 597, 599, 601,603, 605, 607, 609, 611,613, 615, 617, 619, 621,623, 625, 627, or 637, a variant, derivative, orthologue, paralogue or homologue thereof, in which: the amino acid at Mutated site 1 is Cys, and the amino acid at Mutated site 5 is Ile.

[0815] In another preferred embodiment, the mutated PPO comprises a sequence of SEQ ID NO: 1, 2, 3, 4, 5, 6, 7, 8, 9, 10, 11, 12, 13, 14, 15, 16, 17, 18, 19, 20, 21, 22, 23, 24, 25, 26, 27, 28, 29, 30, 31, 32, 33, 34, 35, 36, 37, 38, 39, 40, 41, 42, 43, 44, 45, 46, 47, 48, 49, 50, 51, 52, 53, 54, 55, 56, 57, 58, 59, 60, 61, 62, 63, 64, 65, 66, 67, 68, 69, 70, 71, 72, 73, 74, 75, 76, 77, 78, 79, 80, 81, 82, 83, 84, 85, 86, 87, 88, 89, 90, 91, 92, 93, 94, 95, 96, 97, 98, 99, 100, 101, 102, 103, 104, 105, 106, 107, 108, 109, 110, 111, 112, 113, 114, 115, 116, 117, 577, 579, 581, 583, 585, 587, 589, 591, 593, 595, 597, 599, 601, 603, 605, 607, 609, 611, 613, 615, 617, 619, 621, 623, 625, 627, or 637, a variant, derivative, orthologue, paralogue or homologue thereof, in which: the amino acid at Mutated site 1 is Cys, and the amino acid at Mutated site 5 is Met.

[0816] In another preferred embodiment, the mutated PPO comprises a sequence of SEQ ID NO: 1, 2, 3, 4, 5, 6, 7, 8, 9, 10, 11, 12, 13, 14, 15, 16, 17, 18, 19, 20, 21, 22, 23, 24, 25, 26, 27, 28, 29, 30, 31, 32, 33, 34, 35, 36, 37, 38, 39, 40, 41, 42, 43, 44, 45, 46, 47, 48, 49, 50, 51, 52, 53, 54, 55, 56, 57, 58, 59, 60, 61, 62, 63, 64, 65, 66, 67, 68, 69, 70, 71, 72, 73, 74, 75, 76, 77, 78, 79, 80, 81, 82, 83, 84, 85, 86, 87, 88, 89, 90, 91, 92, 93, 94, 95, 96, 97, 98, 99, 100, 101, 102, 103, 104, 105, 106, 107, 108, 109, 110, 111, 112, 113, 114, 115, 116, 117, 577, 579, 581, 583, 585, 587, 589, 591, 593, 595, 597, 599, 601, 603, 605, 607, 609, 611, 613, 615, 617, 619, 621, 623, 625, 627, or 637, a variant, derivative, orthologue, paralogue or homologue thereof, in which: the amino acid at Mutated site 1 is Phe, and the amino acid at Mutated site 5 is Ala.

[0817] In another preferred embodiment, the mutated PPO comprises a sequence of SEQ ID NO: 1, 2, 3, 4, 5, 6, 7, 8, 9, 10, 11, 12, 13, 14, 15, 16, 17, 18, 19, 20, 21, 22, 23, 24, 25, 26, 27, 28, 29, 30, 31, 32, 33, 34, 35, 36, 37, 38, 39, 40, 41, 42, 43, 44, 45, 46, 47, 48, 49, 50, 51, 52, 53, 54, 55, 56, 57, 58, 59, 60, 61, 62, 63, 64, 65, 66, 67, 68, 69, 70, 71, 72, 73, 74, 75, 76, 77, 78, 79, 80, 81, 82, 83, 84, 85, 86, 87, 88, 89, 90, 91, 92, 93, 94, 95, 96, 97, 98, 99, 100, 101, 102, 103, 104, 105, 106, 107, 108, 109, 110, 111, 112, 113, 114, 115, 116, 117, 577, 579, 581, 583, 585, 587, 589, 591, 593, 595, 597, 599, 601, 603, 605, 607, 609, 611, 613, 615, 617, 619, 621, 623, 625, 627, or 637, a variant, derivative, orthologue, paralogue or homologue thereof, in which: the amino acid at Mutated site 1 is Phe, and the amino acid at Mutated site 5 is Leu.

[0818] In another preferred embodiment, the mutated PPO comprises a sequence of SEQ ID NO: 1, 2, 3, 4, 5, 6, 7, 8, 9, 10, 11, 12, 13, 14, 15, 16, 17, 18, 19, 20, 21, 22, 23, 24, 25, 26, 27, 28, 29, 30, 31, 32, 33, 34, 35, 36, 37, 38, 39, 40, 41, 42, 43, 44, 45, 46, 47, 48, 49, 50, 51, 52, 53, 54, 55, 56, 57, 58, 59, 60, 61, 62, 63, 64, 65, 66, 67, 68, 69, 70, 71, 72, 73, 74, 75, 76, 77, 78, 79, 80, 81, 82, 83, 84, 85, 86, 87, 88, 89, 90, 91, 92, 93, 94, 95, 96, 97, 98, 99, 100, 101, 102, 103, 104, 105, 106, 107, 108, 109, 110, 111, 112, 113, 114, 115, 116, 117, 577, 579, 581, 583, 585, 587, 589, 591, 593, 595, 597, 599, 601, 603, 605, 607, 609, 611, 613, 615, 617, 619, 621, 623, 625, 627, or 637, a variant, derivative, orthologue, paralogue or homologue thereof, in which: the amino acid at Mutated site 1 is Phe, and the amino acid at Mutated site 5 is Val.

[0819] In another preferred embodiment, the mutated PPO comprises a sequence of SEQ ID NO: 1, 2, 3, 4, 5, 6, 7, 8, 9, 10, 11, 12, 13, 14, 15, 16, 17, 18, 19, 20, 21, 22, 23, 24, 25, 26, 27, 28, 29, 30, 31, 32, 33, 34, 35, 36, 37, 38, 39, 40, 41, 42, 43, 44, 45, 46, 47, 48, 49, 50, 51, 52, 53, 54, 55, 56, 57, 58, 59, 60, 61, 62, 63, 64, 65, 66, 67, 68, 69, 70, 71, 72, 73, 74, 75, 76, 77, 78, 79, 80, 81, 82, 83, 84, 85, 86, 87, 88, 89, 90, 91, 92, 93, 94, 95, 96, 97, 98, 99, 100, 101, 102, 103, 104, 105, 106, 107, 108, 109, 110, 111, 112, 113, 114, 115, 116, 117, 577, 579, 581, 583, 585, 587, 589, 591, 593, 595, 597, 599, 601, 603, 605, 607, 609, 611, 613, 615, 617, 619, 621, 623, 625, 627, or 637, a variant, derivative, orthologue, paralogue or homologue thereof, in which: the amino acid at Mutated site 1 is Phe, and the amino acid at Mutated site 5 is Ile.

[0820] In another preferred embodiment, the mutated PPO comprises a sequence of SEQ ID NO: 1, 2, 3, 4, 5, 6, 7, 8, 9, 10, 11, 12, 13, 14, 15, 16, 17, 18, 19, 20, 21, 22, 23, 24, 25, 26, 27, 28, 29, 30, 31, 32, 33, 34, 35, 36, 37, 38, 39, 40, 41, 42, 43, 44, 45, 46, 47, 48, 49, 50, 51, 52, 53, 54, 55, 56, 57, 58, 59, 60, 61, 62, 63, 64, 65, 66, 67, 68, 69, 70, 71, 72, 73, 74, 75, 76, 77, 78, 79, 80, 81, 82, 83, 84, 85, 86, 87, 88, 89, 90, 91, 92, 93, 94, 95, 96, 97, 98, 99, 100, 101, 102, 103, 104, 105, 106, 107, 108,109, 110, 111, 112, 113, 114, 115, 116, 117, 577, 579, 581, 583, 585, 587, 589, 591, 593, 595, 597, 599, 601, 603, 605, 607, 609, 611, 613, 615, 617, 619, 621, 623, 625, 627, or 637, a variant, derivative, orthologue, paralogue or homologue thereof, in which: the amino acid at Mutated site 1 is Phe, and the amino acid at Mutated site 5 is Met.

[0821] In another preferred embodiment, the mutated PPO comprises a sequence of SEQ ID NO: 1, 2, 3, 4, 5, 6, 7, 8, 9, 10, 11, 12, 13, 14, 15, 16, 17, 18, 19, 20, 21, 22, 23, 24, 25, 26, 27, 28, 29, 30, 31, 32, 33, 34, 35, 36, 37, 38, 39, 40, 41, 42, 43, 44, 45, 46, 47, 48, 49, 50, 51, 52, 53, 54, 55, 56, 57, 58, 59, 60, 61, 62, 63, 64, 65, 66, 67, 68, 69, 70, 71, 72, 73, 74, 75, 76, 77, 78, 79, 80, 81, 82, 83, 84, 85, 86, 87, 88, 89, 90, 91, 92, 93, 94, 95, 96, 97, 98, 99, 100, 101, 102, 103, 104, 105, 106, 107, 108, 109, 110, 111, 112, 113, 114, 115, 116, 117, 577, 579, 581, 583, 585, 587, 589, 591, 593, 595, 597, 599, 601, 603, 605, 607, 609, 611, 613, 615, 617, 619, 621, 623, 625, 627, or 637, a variant, derivative, orthologue, paralogue or homologue thereof, in which: the amino acid at Mutated site 1 is Ser, and the amino acid at Mutated site 5 is Ala.

[0822] In another preferred embodiment, the mutated PPO comprises a sequence of SEQ ID NO: 1, 2, 3, 4, 5, 6, 7, 8, 9, 10, 11, 12, 13, 14, 15, 16, 17, 18, 19, 20, 21, 22, 23, 24, 25, 26, 27, 28, 29, 30, 31, 32, 33, 34, 35, 36, 37, 38, 39, 40, 41, 42, 43, 44, 45, 46, 47, 48, 49, 50, 51, 52, 53, 54, 55, 56, 57, 58, 59, 60, 61, 62, 63, 64, 65, 66, 67, 68, 69, 70, 71, 72, 73, 74, 75, 76, 77, 78, 79, 80, 81, 82, 83, 84, 85, 86, 87, 88, 89, 90, 91, 92, 93, 94, 95, 96, 97, 98, 99, 100, 101, 102, 103, 104, 105, 106, 107, 108,109, 110, 111, 112, 113, 114, 115, 116, 117, 577, 579, 581, 583, 585, 587, 589, 591, 593, 595, 597, 599, 601, 603, 605, 607, 609, 611, 613, 615, 617, 619, 621, 623, 625, 627, or 637, a variant, derivative, orthologue, paralogue or homologue thereof, in which: the amino acid at Mutated site 1 is Ser, and the amino acid at Mutated site 5 is Leu.

[0823] In another preferred embodiment, the mutated PPO comprises a sequence of SEQ ID NO: 1, 2, 3, 4, 5, 6, 7, 8, 9, 10, 11, 12, 13, 14, 15, 16, 17, 18, 19, 20, 21, 22, 23, 24, 25, 26, 27, 28, 29, 30, 31, 32, 33, 34, 35, 36, 37, 38, 39, 40, 41, 42, 43, 44, 45, 46, 47, 48, 49, 50, 51, 52, 53, 54, 55, 56, 57, 58, 59, 60, 61, 62, 63, 64, 65, 66, 67, 68, 69, 70, 71, 72, 73, 74, 75, 76, 77, 78, 79, 80, 81, 82, 83, 84, 85, 86, 87, 88, 89, 90, 91, 92, 93, 94, 95, 96, 97, 98, 99, 100, 101, 102, 103, 104, 105, 106, 107, 108, 109, 110, 111, 112, 113, 114, 115, 116, 117, 577, 579, 581, 583, 585, 587, 589, 591, 593, 595, 597, 599, 601, 603, 605, 607, 609, 611, 613, 615, 617, 619, 621, 623, 625, 627, or 637, a variant, derivative, orthologue, paralogue or homologue thereof, in which: the amino acid at Mutated site 1 is Ser, and the amino acid at Mutated site 5 is Val.

[0824] In another preferred embodiment, the mutated PPO comprises a sequence of SEQ ID NO: 1, 2, 3, 4, 5, 6, 7, 8, 9, 10, 11, 12, 13, 14, 15, 16, 17, 18, 19, 20, 21, 22, 23, 24, 25, 26, 27, 28, 29, 30, 31, 32, 33, 34, 35, 36, 37, 38, 39, 40, 41, 42, 43, 44, 45, 46, 47, 48, 49, 50, 51, 52, 53, 54, 55, 56, 57, 58, 59, 60, 61, 62, 63, 64, 65, 66, 67, 68, 69, 70, 71, 72, 73, 74, 75, 76, 77, 78, 79, 80, 81, 82, 83, 84, 85, 86, 87, 88, 89, 90, 91, 92, 93, 94, 95, 96, 97, 98, 99, 100, 101, 102, 103, 104, 105, 106, 107, 108, 109, 110, 111, 112, 113, 114, 115, 116, 117, 577, 579, 581, 583, 585, 587, 589, 591, 593, 595, 597, 599, 601, 603, 605, 607, 609, 611, 613, 615, 617, 619, 621, 623, 625, 627, or 637, a variant, derivative, orthologue, paralogue or homologue thereof, in which: the amino acid at Mutated site 1 is Ser, and the amino acid at Mutated site 5 is Ile.

[0825] In another preferred embodiment, the mutated PPO comprises a sequence of SEQ ID NO: 1, 2, 3, 4, 5, 6, 7, 8, 9, 10, 11, 12, 13, 14, 15, 16, 17, 18, 19, 20, 21, 22, 23, 24, 25, 26, 27, 28, 29, 30, 31, 32, 33, 34, 35, 36, 37, 38, 39, 40, 41, 42, 43, 44, 45, 46, 47, 48, 49, 50, 51, 52, 53, 54, 55, 56, 57, 58, 59, 60, 61, 62, 63, 64, 65, 66, 67, 68, 69, 70, 71, 72, 73, 74, 75, 76, 77, 78, 79, 80, 81, 82, 83, 84, 85, 86, 87, 88, 89, 90, 91, 92, 93, 94, 95, 96, 97, 98, 99, 100, 101, 102, 103, 104, 105, 106, 107, 108, 109, 110, 111, 112, 113, 114, 115, 116, 117, 577, 579, 581, 583, 585, 587, 589, 591, 593, 595, 597, 599, 601, 603, 605, 607, 609, 611, 613, 615, 617, 619, 621, 623, 625, 627, or 637, a variant, derivative, orthologue, paralogue or homologue thereof, in which: the amino acid at Mutated site 1 is Ser, and the amino acid at Mutated site 5 is Met.

[0826] In another preferred embodiment, the mutated PPO comprises a sequence of SEQ ID NO: 1, 2, 3, 4, 5, 6, 7, 8, 9, 10, 11, 12, 13, 14, 15, 16, 17, 18, 19, 20, 21, 22, 23, 24, 25, 26, 27, 28, 29, 30, 31, 32, 33, 34, 35, 36, 37, 38, 39, 40, 41, 42, 43, 44, 45, 46, 47, 48, 49, 50, 51, 52, 53, 54, 55, 56, 57, 58, 59, 60, 61, 62, 63, 64, 65, 66, 67, 68, 69, 70, 71, 72, 73, 74, 75, 76, 77, 78, 79, 80, 81, 82, 83, 84, 85, 86, 87, 88, 89, 90, 91, 92, 93, 94, 95, 96, 97, 98, 99, 100, 101, 102, 103, 104, 105, 106, 107, 108, 109, 110, 111, 112, 113, 114, 115, 116, 117, 577, 579, 581, 583, 585, 587, 589, 591, 593, 595, 597, 599, 601, 603, 605, 607, 609, 611, 613, 615, 617, 619, 621, 623, 625, 627, or 637, a variant, derivative, orthologue, paralogue or homologue thereof, in which: the amino acid at Mutated site 1 is Thr, and the amino acid at Mutated site 5 is Ala.

[0827] In another preferred embodiment, the mutated PPO comprises a sequence of SEQ ID NO: 1, 2, 3, 4, 5, 6, 7, 8, 9, 10, 11, 12, 13, 14, 15, 16, 17, 18, 19, 20, 21, 22, 23, 24, 25, 26, 27, 28, 29, 30, 31, 32, 33, 34, 35, 36, 37, 38, 39, 40, 41, 42, 43, 44, 45, 46, 47, 48, 49, 50, 51, 52, 53, 54, 55, 56, 57, 58, 59, 60, 61, 62, 63, 64, 65, 66, 67, 68, 69, 70, 71, 72, 73, 74, 75, 76, 77, 78, 79, 80, 81, 82, 83, 84, 85, 86, 87, 88, 89, 90, 91, 92, 93, 94, 95, 96, 97, 98, 99, 100, 101, 102, 103, 104, 105, 106, 107, 108, 109, 110, 111, 112, 113, 114, 115, 116, 117, 577, 579, 581, 583, 585, 587, 589, 591, 593, 595, 597, 599, 601, 603, 605, 607, 609, 611, 613, 615, 617, 619, 621, 623, 625, 627, or 637, a variant, derivative, orthologue, paralogue or homologue thereof, in which: the amino acid at Mutated site 1 is Thr, and the amino acid at Mutated site 5 is Leu.

[0828] In another preferred embodiment, the mutated PPO comprises a sequence of SEQ ID NO: 1, 2, 3, 4, 5, 6, 7, 8, 9, 10, 11, 12, 13, 14, 15, 16, 17, 18, 19, 20, 21, 22, 23, 24, 25, 26, 27, 28, 29, 30, 31, 32, 33, 34, 35, 36, 37, 38, 39, 40, 41, 42, 43, 44, 45, 46, 47, 48, 49, 50, 51, 52, 53, 54, 55, 56, 57, 58, 59, 60, 61, 62, 63, 64, 65, 66, 67, 68, 69, 70, 71, 72, 73, 74, 75, 76, 77, 78, 79, 80, 81, 82, 83, 84, 85, 86, 87, 88, 89, 90, 91, 92, 93, 94, 95, 96, 97, 98, 99, 100, 101, 102, 103, 104, 105, 106, 107, 108, 109, 110, 111, 112, 113, 114, 115, 116, 117, 577, 579, 581, 583, 585, 587, 589, 591, 593, 595, 597, 599, 601, 603, 605, 607, 609, 611, 613, 615, 617, 619, 621, 623, 625, 627, or 637, a variant, derivative, orthologue, paralogue or homologue thereof, in which: the amino acid at Mutated site 1 is Thr, and the amino acid at Mutated site 5 is Val.

[0829] In another preferred embodiment, the mutated PPO comprises a sequence of SEQ ID NO: 1, 2, 3, 4, 5, 6, 7, 8, 9, 10, 11, 12, 13, 14, 15, 16, 17, 18, 19, 20, 21, 22, 23, 24, 25, 26, 27, 28, 29, 30, 31, 32, 33, 34, 35, 36, 37, 38, 39, 40, 41, 42, 43, 44, 45, 46, 47, 48, 49, 50, 51, 52, 53, 54, 55, 56, 57, 58, 59, 60, 61, 62, 63, 64, 65, 66, 67, 68, 69, 70, 71, 72, 73, 74, 75, 76, 77, 78, 79, 80, 81, 82, 83, 84, 85, 86, 87, 88, 89, 90, 91, 92, 93, 94, 95, 96, 97, 98, 99, 100, 101, 102, 103, 104, 105, 106, 107, 108, 109, 110, 111, 112, 113, 114, 115, 116, 117, 577, 579, 581, 583, 585, 587, 589, 591, 593, 595, 597, 599, 601, 603, 605, 607, 609, 611, 613, 615, 617, 619, 621, 623, 625, 627, or 637, a variant, derivative, orthologue, paralogue or homologue thereof, in which: the amino acid at Mutated site 1 is Thr, and the amino acid at Mutated site 5 is Ile.

[0830] In another preferred embodiment, the mutated PPO comprises a sequence of SEQ ID NO: 1, 2, 3, 4, 5, 6, 7, 8, 9, 10, 11, 12, 13, 14, 15, 16, 17, 18, 19, 20, 21, 22, 23, 24, 25, 26, 27, 28, 29, 30, 31, 32, 33, 34, 35, 36, 37, 38, 39, 40, 41, 42, 43, 44, 45, 46, 47, 48, 49, 50, 51, 52, 53, 54, 55, 56, 57, 58, 59, 60, 61, 62, 63, 64, 65, 66, 67, 68, 69, 70, 71, 72, 73, 74, 75, 76, 77, 78, 79, 80, 81, 82, 83, 84, 85, 86, 87, 88, 89, 90, 91, 92, 93, 94, 95, 96, 97, 98, 99, 100, 101, 102, 103, 104, 105, 106, 107, 108, 109, 110, 111, 112, 113, 114, 115, 116, 117, 577, 579, 581, 583, 585, 587, 589, 591, 593, 595, 597, 599, 601, 603, 605, 607, 609, 611, 613, 615, 617, 619, 621, 623, 625, 627, or 637, a variant, derivative, orthologue, paralogue or homologue thereof, in which: the amino acid at Mutated site 1 is Thr, and the amino acid at Mutated site 5 is Met.

[0831] In another preferred embodiment, the mutated PPO comprises a sequence of SEQ ID NO: 1, 2, 3, 4, 5, 6, 7, 8, 9, 10, 11, 12, 13, 14, 15, 16, 17, 18, 19, 20, 21, 22, 23, 24, 25, 26, 27, 28, 29, 30, 31, 32, 33, 34, 35, 36, 37, 38, 39, 40, 41, 42, 43, 44, 45, 46, 47, 48, 49, 50, 51, 52, 53, 54, 55, 56, 57, 58, 59, 60, 61, 62, 63, 64, 65, 66, 67, 68, 69, 70, 71, 72, 73, 74, 75, 76, 77, 78, 79, 80, 81, 82, 83, 84, 85, 86, 87, 88, 89, 90, 91, 92, 93, 94, 95, 96, 97, 98, 99, 100, 101, 102, 103, 104, 105, 106, 107, 108, 109, 110, 111, 112, 113, 114, 115, 116, 117, 577, 579, 581, 583, 585, 587, 589, 591, 593, 595, 597, 599, 601, 603, 605, 607, 609, 611, 613, 615, 617, 619, 621, 623, 625, 627, or 637, a variant, derivative, orthologue, paralogue or homologue thereof, in which: the amino acid at Mutated site 1 is Gln, and the amino acid at Mutated site 5 is Ala.

[0832] In another preferred embodiment, the mutated PPO comprises a sequence of SEQ ID NO: 1, 2, 3, 4, 5, 6, 7, 8, 9, 10, 11, 12, 13, 14, 15, 16, 17, 18, 19, 20, 21, 22, 23, 24, 25, 26, 27, 28, 29, 30, 31, 32, 33, 34, 35, 36, 37, 38, 39, 40, 41, 42, 43, 44, 45, 46, 47, 48, 49, 50, 51, 52, 53, 54, 55, 56, 57, 58, 59, 60, 61, 62, 63, 64, 65, 66, 67, 68, 69, 70, 71, 72, 73, 74, 75, 76, 77, 78, 79, 80, 81, 82, 83, 84, 85, 86, 87, 88, 89, 90, 91, 92, 93, 94, 95, 96, 97, 98, 99, 100, 101, 102, 103, 104, 105, 106, 107, 108,109, 110, 111, 112, 113, 114, 115, 116, 117, 577, 579, 581, 583, 585, 587, 589, 591, 593, 595, 597, 599, 601, 603, 605, 607, 609, 611, 613, 615, 617, 619, 621, 623, 625, 627, or 637, a variant, derivative, orthologue, paralogue or homologue thereof, in which: the amino acid at Mutated site 1 is Gln, and the amino acid at Mutated site 5 is Leu.

[0833] In another preferred embodiment, the mutated PPO comprises a sequence of SEQ ID NO: 1, 2, 3, 4, 5, 6, 7, 8, 9, 10, 11, 12, 13, 14, 15, 16, 17, 18, 19, 20, 21, 22, 23, 24, 25, 26, 27, 28, 29, 30, 31, 32, 33, 34, 35, 36, 37, 38, 39, 40, 41, 42, 43, 44, 45, 46, 47, 48, 49, 50, 51, 52, 53, 54, 55, 56, 57, 58, 59, 60, 61, 62, 63, 64, 65, 66, 67, 68, 69, 70, 71, 72, 73, 74, 75, 76, 77, 78, 79, 80, 81, 82, 83, 84, 85, 86, 87, 88, 89, 90, 91, 92, 93, 94, 95, 96, 97, 98, 99, 100, 101, 102, 103, 104, 105, 106, 107, 108, 109, 110, 111, 112, 113, 114, 115, 116, 117, 577, 579, 581, 583, 585, 587, 589, 591, 593, 595, 597, 599, 601, 603, 605, 607, 609, 611, 613, 615, 617, 619, 621, 623, 625, 627, or 637, a variant, derivative, orthologue, paralogue or homologue thereof, in which: the amino acid at Mutated site 1 is Gln, and the amino acid at Mutated site 5 is Val.

[0834] In another preferred embodiment, the mutated PPO comprises a sequence of SEQ ID NO: 1, 2, 3, 4, 5, 6, 7, 8, 9, 10, 11, 12, 13, 14, 15, 16, 17, 18, 19, 20, 21, 22, 23, 24, 25, 26, 27, 28, 29, 30, 31, 32, 33, 34, 35, 36, 37, 38, 39, 40, 41, 42, 43, 44, 45, 46, 47, 48, 49, 50, 51, 52, 53, 54, 55, 56, 57, 58, 59, 60, 61, 62, 63, 64, 65, 66, 67, 68, 69, 70, 71, 72, 73, 74, 75, 76, 77, 78, 79, 80, 81, 82, 83, 84, 85, 86, 87, 88, 89, 90, 91, 92, 93, 94, 95, 96, 97, 98, 99, 100, 101, 102, 103, 104, 105, 106, 107, 108, 109, 110, 111, 112, 113, 114, 115, 116, 117, 577, 579, 581, 583, 585, 587, 589, 591, 593, 595, 597, 599, 601, 603, 605, 607, 609, 611, 613, 615, 617, 619, 621, 623, 625, 627, or 637, a variant, derivative, orthologue, paralogue or homologue thereof, in which: the amino acid at Mutated site 1 is Gln, and the amino acid at Mutated site 5 is Ile.

[0835] In another preferred embodiment, the mutated PPO comprises a sequence of SEQ ID NO: 1, 2, 3, 4, 5, 6, 7, 8, 9, 10, 11, 12, 13, 14, 15, 16, 17, 18, 19, 20, 21, 22, 23, 24, 25, 26, 27, 28, 29, 30, 31, 32, 33, 34, 35, 36, 37, 38, 39, 40, 41, 42, 43, 44, 45, 46, 47, 48, 49, 50, 51, 52, 53, 54, 55, 56, 57, 58, 59, 60, 61, 62, 63, 64, 65, 66, 67, 68, 69, 70, 71, 72, 73, 74, 75, 76, 77, 78, 79, 80, 81, 82, 83, 84, 85, 86, 87, 88, 89, 90, 91, 92, 93, 94, 95, 96, 97, 98, 99, 100, 101, 102, 103, 104, 105, 106, 107, 108, 109, 110, 111, 112, 113, 114, 115, 116, 117, 577, 579, 581, 583, 585, 587, 589, 591, 593, 595, 597, 599, 601, 603, 605, 607, 609, 611, 613, 615, 617, 619, 621, 623, 625, 627, or 637, a variant, derivative, orthologue, paralogue or homologue thereof, in which: the amino acid at Mutated site 1 is Gln, and the amino acid at Mutated site 5 is Met.

[0836] In another preferred embodiment, the mutated PPO comprises a sequence of SEQ ID NO: 1, 2, 3, 4, 5, 6, 7, 8, 9, 10, 11, 12, 13, 14, 15, 16, 17, 18, 19, 20, 21, 22, 23, 24, 25, 26, 27, 28, 29, 30, 31, 32, 33, 34, 35, 36, 37, 38, 39, 40, 41, 42, 43, 44, 45, 46, 47, 48, 49, 50, 51, 52, 53, 54, 55, 56, 57, 58, 59, 60, 61, 62, 63, 64, 65, 66, 67, 68, 69, 70, 71, 72, 73, 74, 75, 76, 77, 78, 79, 80, 81, 82, 83, 84, 85, 86, 87, 88, 89, 90, 91, 92, 93, 94, 95, 96, 97, 98, 99, 100, 101, 102, 103, 104, 105, 106, 107, 108, 109, 110, 111, 112, 113, 114, 115, 116, 117, 577, 579, 581, 583, 585, 587, 589, 591, 593, 595, 597, 599, 601, 603, 605, 607, 609, 611, 613, 615, 617, 619, 621, 623, 625, 627, or 637, a variant, derivative, orthologue, paralogue or homologue thereof, in which: the amino acid at Mutated site 1 is His, and the amino acid at Mutated site 5 is Ala.

[0837] In another preferred embodiment, the mutated PPO comprises a sequence of SEQ ID NO: 1, 2, 3, 4, 5, 6, 7, 8, 9, 10, 11, 12, 13, 14, 15, 16, 17, 18, 19, 20, 21, 22, 23, 24, 25, 26, 27, 28, 29, 30, 31, 32, 33, 34, 35, 36, 37, 38, 39, 40, 41, 42, 43, 44, 45, 46, 47, 48, 49, 50, 51, 52, 53, 54, 55, 56, 57, 58, 59, 60, 61, 62, 63, 64, 65, 66, 67, 68, 69, 70, 71, 72, 73, 74, 75, 76, 77, 78, 79, 80, 81, 82, 83, 84, 85, 86, 87, 88, 89, 90, 91, 92, 93, 94, 95, 96, 97, 98, 99, 100, 101, 102, 103, 104, 105, 106, 107, 108, 109, 110, 111, 112, 113, 114, 115, 116, 117, 577, 579, 581, 583, 585, 587, 589, 591, 593, 595, 597, 599, 601, 603, 605, 607, 609, 611, 613, 615, 617, 619, 621, 623, 625, 627, or 637, a variant, derivative, orthologue, paralogue or homologue thereof, in which: the amino acid at Mutated site 1 is His, and the amino acid at Mutated site 5 is Leu.

[0838] In another preferred embodiment, the mutated PPO comprises a sequence of SEQ ID NO: 1, 2, 3, 4, 5, 6, 7, 8, 9, 10, 11, 12, 13, 14, 15, 16, 17, 18, 19, 20, 21, 22, 23, 24, 25, 26, 27, 28, 29, 30, 31, 32, 33, 34, 35, 36, 37, 38, 39, 40, 41, 42, 43, 44, 45, 46, 47, 48, 49, 50, 51, 52, 53, 54, 55, 56, 57, 58, 59, 60, 61, 62, 63, 64, 65, 66, 67, 68, 69, 70, 71, 72, 73, 74, 75, 76, 77, 78, 79, 80, 81, 82, 83, 84, 85, 86, 87, 88, 89, 90, 91, 92, 93, 94, 95, 96, 97, 98, 99, 100, 101, 102, 103, 104, 105, 106, 107, 108, 109, 110, 111, 112, 113, 114, 115, 116, 117, 577, 579, 581, 583, 585, 587, 589, 591, 593, 595, 597, 599, 601, 603, 605, 607, 609, 611, 613, 615, 617, 619, 621, 623, 625, 627, or 637, a variant, derivative, orthologue, paralogue or homologue thereof, in which: the amino acid at Mutated site 1 is His, and the amino acid at Mutated site 5 is Val.

[0839] In another preferred embodiment, the mutated PPO comprises a sequence of SEQ ID NO: 1, 2, 3, 4, 5, 6, 7, 8, 9, 10, 11, 12, 13, 14, 15, 16, 17, 18, 19, 20, 21, 22, 23, 24, 25, 26, 27, 28, 29, 30, 31, 32, 33, 34, 35, 36, 37, 38, 39, 40, 41, 42, 43, 44, 45, 46, 47, 48, 49, 50, 51, 52, 53, 54, 55, 56, 57, 58, 59, 60, 61, 62, 63, 64, 65, 66, 67, 68, 69, 70, 71, 72, 73, 74, 75, 76, 77, 78, 79, 80, 81, 82, 83, 84, 85, 86, 87, 88, 89, 90, 91, 92, 93, 94, 95, 96, 97, 98, 99, 100, 101, 102, 103, 104, 105, 106, 107, 108, 109, 110, 111, 112, 113, 114, 115, 116, 117, 577, 579, 581, 583, 585, 587, 589, 591, 593, 595, 597, 599, 601, 603, 605, 607, 609, 611, 613, 615, 617, 619, 621, 623, 625, 627, or 637, a variant, derivative, orthologue, paralogue or homologue thereof, in which: the amino acid at Mutated site 1 is His, and the amino acid at Mutated site 5 is Ile.

[0840] In another preferred embodiment, the mutated PPO comprises a sequence of SEQ ID NO: 1, 2, 3, 4, 5, 6, 7, 8, 9, 10, 11, 12, 13, 14, 15, 16, 17, 18, 19, 20, 21, 22, 23, 24, 25, 26, 27, 28, 29, 30, 31, 32, 33, 34, 35, 36, 37, 38, 39, 40, 41, 42, 43, 44, 45, 46, 47, 48, 49, 50, 51, 52, 53, 54, 55, 56, 57, 58, 59, 60, 61, 62, 63, 64, 65, 66, 67, 68, 69, 70, 71, 72, 73, 74, 75, 76, 77, 78, 79, 80, 81, 82, 83, 84, 85, 86, 87, 88, 89, 90, 91, 92, 93, 94, 95, 96, 97, 98, 99, 100, 101, 102, 103, 104, 105, 106, 107, 108, 109, 110, 111, 112, 113, 114, 115, 116, 117, 577, 579, 581, 583, 585, 587, 589, 591, 593, 595, 597, 599, 601, 603, 605, 607, 609, 611, 613, 615, 617, 619, 621, 623, 625, 627, or 637, a variant, derivative, orthologue, paralogue or homologue thereof, in which: the amino acid at Mutated site 1 is His, and the amino acid at Mutated site 5 is Met.

[0841] In another preferred embodiment, the mutated PPO refers to a polypeptide of SEQ ID NO: 1, 2, 3, 4, 5, 6, 7, 8, 9, 10, 11, 12, 13, 14, 15, 16, 17, 18, 19, 20, 21, 22, 23, 24, 25, 26, 27, 28, 29, 30, 31, 32, 33, 34, 35, 36, 37, 38, 39, 40, 41, 42, 43, 44, 45, 46, 47, 48, 49, 50, 51, 52, 53, 54, 55, 56, 57, 58, 59, 60, 61, 62, 63, 64, 65, 66, 67, 68, 69, 70, 71, 72, 73, 74, 75, 76, 77, 78, 79, 80, 81, 82, 83, 84, 85, 86, 87, 88, 89, 90, 91, 92, 93, 94, 95, 96, 97, 98, 99, 100, 101, 102, 103, 104, 105, 106, 107, 108, 109, 110, 111, 112, 113, 114, 115, 116, or 117, in which the amino acid sequence differs at Mutated site 4 (which corresponds to Leu397 of SEQ ID NO: 1) according to Table 2a, and/or at Mutated site 5 (which corresponds to Phe420 of SEQ ID NO: 1) according to Table 2a.

[0842] Examples of differences at these amino acid positions include, but are not limited to, one or more of the following:
[0843] the amino acid at Mutated site 4 is other than Leucine (or Alanine, or Serine, or Phenylalanine, as the case may be according to Table 2a);
[0844] the amino acid at Mutated site 5 is other than Phenylalanine (or Methionine, or Tyrosine, or Leucine, as the case may be according to Table 2a),
[0845] In particularly preferred embodiment, the mutated PPO comprises a sequence of SEQ ID NO: 1, 2, 3, 4, 5, 6, 7, 8, 9, 10, 11, 12, 13, 14, 15, 16, 17, 18, 19, 20, 21, 22, 23, 24, 25, 26, 27, 28, 29, 30, 31, 32, 33, 34, 35, 36, 37, 38, 39, 40, 41, 42, 43, 44, 45, 46, 47, 48, 49, 50, 51, 52, 53, 54, 55, 56, 57, 58, 59, 60, 61, 62, 63, 64, 65, 66, 67, 68, 69, 70, 71, 72, 73, 74, 75, 76, 77, 78, 79, 80, 81, 82, 83, 84, 85, 86, 87, 88, 89, 90, 91, 92, 93, 94, 95, 96, 97, 98, 99, 100, 101, 102, 103, 104, 105, 106, 107, 108, 109, 110, 111, 112, 113, 114, 115, 116, 117, 577, 579, 581, 583, 585, 587, 589, 591, 593, 595, 597, 599, 601, 603, 605, 607, 609, 611, 613, 615, 617, 619, 621, 623, 625, 627, or 637, a variant, derivative, orthologue, paralogue or homologue thereof, in which:
[0846] the amino acid at Mutated site 4 (which corresponds to Leu397 of SEQ ID NO: 1) is Ala, Arg, Val, lie, Met, His, Lys, Asp, Glu, Ser, Thr, Asn, Gln, Cys, Gly, Pro, Phe, Tyr, or Trp, and the amino acid at Mutated site 5 (which corresponds to Phe420 of SEQ ID NO: 1) is Ala, Leu, Val, lie, Met, His, Lys, Asp, Glu, Ser, Thr, Asn, Gln, Cys, Gly, Pro, Arg, Tyr, or Trp.

[0847] In another preferred embodiment, the mutated PPO comprises a sequence of SEQ ID NO: 1, 2, 3, 4, 5, 6, 7, 8, 9, 10, 11, 12, 13, 14, 15, 16, 17, 18, 19, 20, 21, 22, 23, 24, 25, 26, 27, 28, 29, 30, 31, 32, 33, 34, 35, 36, 37, 38, 39, 40, 41, 42, 43, 44, 45, 46, 47, 48, 49, 50, 51, 52, 53, 54, 55, 56, 57, 58, 59, 60, 61, 62, 63, 64, 65, 66, 67, 68, 69, 70, 71, 72, 73, 74, 75, 76, 77, 78, 79, 80, 81, 82, 83, 84, 85, 86, 87, 88, 89, 90, 91, 92, 93, 94, 95, 96, 97, 98, 99, 100, 101, 102, 103, 104, 105, 106, 107, 108, 109, 110, 111, 112, 113, 114, 115, 116, 117, 577, 579, 581, 583, 585, 587, 589, 591, 593, 595, 597, 599, 601, 603, 605, 607, 609, 611, 613, 615, 617, 619, 621, 623, 625, 627, or 637, a variant, derivative, orthologue, paralogue or homologue thereof, in which: the amino acid at Mutated site 4 is Ala, and the amino acid at Mutated site 5 is Ala.

[0848] In another preferred embodiment, the mutated PPO comprises a sequence of SEQ ID NO: 1, 2, 3, 4, 5, 6, 7, 8, 9, 10, 11, 12, 13, 14, 15, 16, 17, 18, 19, 20, 21, 22, 23, 24, 25, 26, 27, 28, 29, 30, 31, 32, 33, 34, 35, 36, 37, 38, 39, 40, 41, 42, 43, 44, 45, 46, 47, 48, 49, 50, 51, 52, 53, 54, 55, 56, 57, 58, 59, 60, 61, 62, 63, 64, 65, 66, 67, 68, 69, 70, 71, 72, 73, 74, 75, 76, 77, 78, 79, 80, 81, 82, 83, 84, 85, 86, 87, 88, 89, 90, 91, 92, 93, 94, 95, 96, 97, 98, 99, 100, 101, 102, 103, 104, 105, 106, 107, 108, 109, 110, 111, 112, 113, 114, 115, 116, 117, 577, 579, 581, 583, 585, 587, 589, 591, 593, 595, 597, 599, 601, 603, 605, 607, 609, 611, 613, 615, 617, 619, 621, 623, 625, 627, or 637, a variant, derivative, orthologue, paralogue or homologue thereof, in which: the amino acid at Mutated site 4 is Ala, and the amino acid at Mutated site 5 is Leu.

[0849] In another preferred embodiment, the mutated PPO comprises a sequence of SEQ ID NO: 1, 2, 3, 4, 5, 6, 7, 8, 9, 10, 11, 12, 13, 14, 15, 16, 17, 18, 19, 20, 21, 22, 23, 24, 25, 26, 27, 28, 29, 30, 31, 32, 33, 34, 35, 36, 37, 38, 39, 40, 41, 42, 43, 44, 45, 46, 47, 48, 49, 50, 51, 52, 53, 54, 55, 56, 57, 58, 59, 60, 61, 62, 63, 64, 65, 66, 67, 68, 69, 70, 71, 72, 73, 74, 75, 76, 77, 78, 79, 80, 81, 82, 83, 84, 85, 86, 87, 88, 89, 90, 91, 92, 93, 94, 95, 96, 97, 98, 99, 100, 101, 102, 103, 104, 105, 106, 107, 108, 109, 110, 111, 112, 113, 114, 115, 116, 117, 577, 579, 581, 583, 585, 587, 589, 591, 593, 595, 597, 599, 601, 603, 605, 607, 609, 611, 613, 615, 617, 619, 621, 623, 625, 627, or 637, a variant, derivative, orthologue, paralogue or homologue thereof, in which: the amino acid at Mutated site 4 is Ala, and the amino acid at Mutated site 5 is Val.

[0850] In another preferred embodiment, the mutated PPO comprises a sequence of SEQ ID NO: 1, 2, 3, 4, 5, 6, 7, 8, 9, 10, 11, 12, 13, 14, 15, 16, 17, 18, 19, 20, 21, 22, 23, 24, 25, 26, 27, 28, 29, 30, 31, 32, 33, 34, 35, 36, 37, 38, 39, 40, 41, 42, 43, 44, 45, 46, 47, 48, 49, 50, 51, 52, 53, 54, 55, 56, 57, 58, 59, 60, 61, 62, 63, 64, 65, 66, 67, 68, 69, 70, 71, 72, 73, 74, 75, 76, 77, 78, 79, 80, 81, 82, 83, 84, 85, 86, 87, 88, 89, 90, 91, 92, 93, 94, 95, 96, 97, 98, 99, 100, 101, 102, 103, 104, 105, 106, 107, 108, 109, 110, 111, 112, 113, 114, 115, 116, 117, 577, 579, 581, 583, 585, 587, 589, 591, 593, 595, 597, 599, 601, 603, 605, 607, 609, 611, 613, 615, 617, 619, 621, 623, 625, 627, or 637, a variant, derivative, orthologue, paralogue or homologue thereof, in which: the amino acid at Mutated site 4 is Ala, and the amino acid at Mutated site 5 is Ile.

[0851] In another preferred embodiment, the mutated PPO comprises a sequence of SEQ ID NO: 1, 2, 3, 4, 5, 6, 7, 8, 9, 10, 11, 12, 13, 14, 15, 16, 17, 18, 19, 20, 21, 22, 23, 24, 25, 26, 27, 28, 29, 30, 31, 32, 33, 34, 35, 36, 37, 38, 39, 40, 41, 42, 43, 44, 45, 46, 47, 48, 49, 50, 51, 52, 53, 54, 55, 56, 57, 58, 59, 60, 61, 62, 63, 64, 65, 66, 67, 68, 69, 70, 71, 72, 73, 74, 75, 76, 77, 78, 79, 80, 81, 82, 83, 84, 85, 86, 87, 88, 89, 90, 91, 92, 93, 94, 95, 96, 97, 98, 99, 100, 101, 102, 103, 104, 105, 106, 107, 108, 109, 110, 111, 112, 113, 114, 115, 116, 117, 577, 579, 581, 583, 585, 587, 589, 591, 593, 595, 597, 599, 601, 603, 605, 607, 609, 611, 613, 615, 617, 619, 621, 623, 625, 627, or 637, a variant, derivative, orthologue, paralogue or homologue thereof, in which: the amino acid at Mutated site 4 is Ala, and the amino acid at Mutated site 5 is Met.

[0852] In another preferred embodiment, the mutated PPO comprises a sequence of SEQ ID NO: 1, 2, 3, 4, 5, 6, 7, 8, 9, 10, 11, 12, 13, 14, 15, 16, 17, 18, 19, 20, 21, 22, 23, 24, 25, 26, 27, 28, 29, 30, 31, 32, 33, 34, 35, 36, 37, 38, 39, 40, 41, 42, 43, 44, 45, 46, 47, 48, 49, 50, 51, 52, 53, 54, 55, 56, 57, 58, 59, 60, 61, 62, 63, 64, 65, 66, 67, 68, 69, 70, 71, 72, 73, 74, 75, 76, 77, 78, 79, 80, 81, 82, 83, 84, 85, 86, 87, 88, 89, 90, 91, 92, 93, 94, 95, 96, 97, 98, 99, 100, 101, 102, 103, 104, 105, 106, 107, 108, 109, 110, 111, 112, 113, 114, 115, 116, 117, 577, 579, 581, 583, 585, 587, 589, 591, 593, 595, 597, 599, 601, 603, 605, 607, 609, 611, 613, 615, 617, 619, 621, 623, 625, 627, or 637, a variant, derivative, orthologue, paralogue or homologue thereof, in which: the amino acid at Mutated site 4 is Ala, and the amino acid at Mutated site 5 is His.

[0853] In another preferred embodiment, the mutated PPO comprises a sequence of SEQ ID NO: 1, 2, 3, 4, 5, 6, 7, 8, 9, 10, 11, 12, 13, 14, 15, 16, 17, 18, 19, 20, 21, 22, 23, 24, 25, 26, 27, 28, 29, 30, 31, 32, 33, 34, 35, 36, 37, 38, 39, 40, 41, 42, 43, 44, 45, 46, 47, 48, 49, 50, 51, 52, 53, 54, 55, 56, 57, 58, 59, 60, 61, 62, 63, 64, 65, 66, 67, 68, 69, 70, 71, 72, 73, 74, 75, 76, 77, 78, 79, 80, 81, 82, 83, 84, 85, 86, 87, 88, 89, 90, 91, 92, 93, 94, 95, 96, 97, 98, 99, 100, 101, 102, 103, 104, 105, 106, 107, 108, 109, 110, 111, 112, 113, 114, 115, 116, 117, 577, 579, 581, 583, 585, 587, 589, 591, 593, 595, 597, 599, 601, 603, 605, 607, 609, 611, 613, 615, 617, 619, 621, 623, 625, 627, or 637, a variant, derivative, orthologue, paralogue or homologue thereof, in which: the amino acid at Mutated site 4 is Ala, and the amino acid at Mutated site 5 is Lys.

[0854] In another preferred embodiment, the mutated PPO comprises a sequence of SEQ ID NO: 1, 2, 3, 4, 5, 6, 7, 8, 9, 10, 11, 12, 13, 14, 15, 16, 17, 18, 19, 20, 21, 22, 23, 24, 25, 26, 27, 28, 29, 30, 31, 32, 33, 34, 35, 36, 37, 38, 39, 40, 41, 42, 43, 44, 45, 46, 47, 48, 49, 50, 51, 52, 53, 54, 55, 56, 57, 58, 59, 60, 61, 62, 63, 64, 65, 66, 67, 68, 69, 70, 71, 72, 73, 74, 75, 76, 77, 78, 79, 80, 81, 82, 83, 84, 85, 86, 87, 88, 89, 90, 91, 92, 93, 94, 95, 96, 97, 98, 99, 100, 101, 102, 103, 104, 105, 106, 107, 108, 109, 110, 111, 112, 113, 114, 115, 116, 117, 577, 579, 581, 583, 585, 587, 589, 591, 593, 595, 597, 599, 601, 603, 605, 607, 609, 611, 613, 615, 617, 619, 621, 623, 625, 627, or 637, a variant, derivative, orthologue, paralogue or homologue thereof, in which: the amino acid at Mutated site 4 is Ala, and the amino acid at Mutated site 5 is Asp.

[0855] In another preferred embodiment, the mutated PPO comprises a sequence of SEQ ID NO: 1, 2, 3, 4, 5, 6, 7, 8, 9, 10, 11, 12, 13, 14, 15, 16, 17, 18, 19, 20, 21, 22, 23, 24, 25, 26, 27, 28, 29, 30, 31, 32, 33, 34, 35, 36, 37, 38, 39, 40, 41, 42, 43, 44, 45, 46, 47, 48, 49, 50, 51, 52, 53, 54, 55, 56, 57, 58, 59, 60, 61, 62, 63, 64, 65, 66, 67, 68, 69, 70, 71, 72, 73, 74, 75, 76, 77, 78, 79, 80, 81, 82, 83, 84, 85, 86, 87, 88, 89, 90, 91, 92, 93, 94, 95, 96, 97, 98, 99, 100, 101, 102, 103, 104, 105, 106, 107, 108, 109, 110, 111, 112, 113, 114, 115, 116, 117, 577, 579, 581, 583, 585, 587, 589, 591, 593, 595, 597, 599, 601, 603, 605, 607, 609, 611, 613, 615, 617, 619, 621, 623, 625, 627, or 637, a variant, derivative, orthologue, paralogue or homologue thereof, in which: the amino acid at Mutated site 4 is Ala, and the amino acid at Mutated site 5 is Glu.

[0856] In another preferred embodiment, the mutated PPO comprises a sequence of SEQ ID NO: 1, 2, 3, 4, 5, 6, 7, 8, 9, 10, 11, 12, 13, 14, 15, 16, 17, 18, 19, 20, 21, 22, 23, 24, 25, 26, 27, 28, 29, 30, 31, 32, 33, 34, 35, 36, 37, 38, 39, 40, 41, 42, 43, 44, 45, 46, 47, 48, 49, 50, 51, 52, 53, 54, 55, 56, 57, 58, 59, 60, 61, 62, 63, 64, 65, 66, 67, 68, 69, 70, 71, 72, 73, 74, 75, 76, 77, 78, 79, 80, 81, 82, 83, 84, 85, 86, 87, 88, 89, 90, 91, 92, 93, 94, 95, 96, 97, 98, 99, 100, 101, 102, 103, 104, 105, 106, 107, 108, 109, 110, 111, 112, 113, 114, 115, 116, 117, 577, 579, 581, 583, 585, 587, 589, 591, 593, 595, 597, 599, 601, 603, 605, 607, 609, 611, 613, 615, 617, 619, 621, 623, 625, 627, or 637, a variant, derivative, orthologue, paralogue or homologue thereof, in which: the amino acid at Mutated site 4 is Ala, and the amino acid at Mutated site 5 is Ser.

[0857] In another preferred embodiment, the mutated PPO comprises a sequence of SEQ ID NO: 1, 2, 3, 4, 5, 6, 7, 8, 9, 10, 11, 12, 13, 14, 15, 16, 17, 18, 19, 20, 21, 22, 23, 24, 25, 26, 27, 28, 29, 30, 31, 32, 33, 34, 35, 36, 37, 38, 39, 40, 41, 42, 43, 44, 45, 46, 47, 48, 49, 50, 51, 52, 53, 54, 55, 56, 57, 58, 59, 60, 61, 62, 63, 64, 65, 66, 67, 68, 69, 70, 71, 72, 73, 74, 75, 76, 77, 78, 79, 80, 81, 82, 83, 84, 85, 86, 87, 88, 89, 90, 91, 92, 93, 94, 95, 96, 97, 98, 99, 100, 101, 102, 103, 104, 105, 106, 107, 108, 109, 110, 111, 112, 113, 114, 115, 116, 117, 577, 579, 581, 583, 585, 587, 589, 591, 593, 595, 597, 599, 601, 603, 605, 607, 609, 611, 613, 615, 617, 619, 621, 623, 625, 627, or 637, a variant, derivative, orthologue, paralogue or homologue thereof, in which: the amino acid at Mutated site 4 is Ala, and the amino acid at Mutated site 5 is Thr.

[0858] In another preferred embodiment, the mutated PPO comprises a sequence of SEQ ID NO: 1, 2, 3, 4, 5, 6, 7, 8, 9, 10, 11, 12, 13, 14, 15, 16, 17, 18, 19, 20, 21, 22, 23, 24, 25, 26, 27, 28, 29, 30, 31, 32, 33, 34, 35, 36, 37, 38, 39, 40, 41, 42, 43, 44, 45, 46, 47, 48, 49, 50, 51, 52, 53, 54, 55, 56, 57, 58, 59, 60, 61, 62, 63, 64, 65, 66, 67, 68, 69, 70, 71, 72, 73, 74, 75, 76, 77, 78, 79, 80, 81, 82, 83, 84, 85, 86, 87, 88, 89, 90, 91, 92, 93, 94, 95, 96, 97, 98, 99, 100, 101, 102, 103, 104, 105, 106, 107, 108, 109, 110, 111, 112, 113, 114, 115, 116, 117, 577, 579, 581, 583, 585, 587, 589, 591, 593, 595, 597, 599, 601, 603, 605, 607, 609, 611, 613, 615, 617, 619, 621, 623, 625, 627, or 637, a variant, derivative, orthologue, paralogue or homologue thereof, in which: the amino acid at Mutated site 4 is Ala, and the amino acid at Mutated site 5 is Asn.

[0859] In another preferred embodiment, the mutated PPO comprises a sequence of SEQ ID NO: 1, 2, 3, 4, 5, 6, 7, 8, 9, 10, 11, 12, 13, 14, 15, 16, 17, 18, 19, 20, 21, 22, 23, 24, 25, 26, 27, 28, 29, 30, 31, 32, 33, 34, 35, 36, 37, 38, 39, 40, 41, 42, 43, 44, 45, 46, 47, 48, 49, 50, 51, 52, 53, 54, 55, 56, 57, 58, 59, 60, 61, 62, 63, 64, 65, 66, 67, 68, 69, 70, 71, 72, 73, 74, 75, 76, 77, 78, 79, 80, 81, 82, 83, 84, 85, 86, 87, 88, 89, 90, 91, 92, 93, 94, 95, 96, 97, 98, 99, 100, 101, 102, 103, 104, 105, 106, 107, 108, 109, 110, 111, 112, 113, 114, 115, 116, 117, 577, 579, 581, 583, 585, 587, 589, 591, 593, 595, 597, 599, 601, 603, 605, 607, 609, 611, 613, 615, 617, 619, 621, 623, 625, 627, or 637, a variant, derivative, orthologue, paralogue or homologue thereof, in which: the amino acid at Mutated site 4 is Ala, and the amino acid at Mutated site 5 is Gln.

[0860] In another preferred embodiment, the mutated PPO comprises a sequence of SEQ ID NO: 1, 2, 3, 4, 5, 6, 7, 8, 9, 10, 11, 12, 13, 14, 15, 16, 17, 18, 19, 20, 21, 22, 23, 24, 25, 26, 27, 28, 29, 30, 31, 32, 33, 34, 35, 36, 37, 38, 39, 40, 41, 42, 43, 44, 45, 46, 47, 48, 49, 50, 51, 52, 53, 54, 55, 56, 57, 58, 59, 60, 61, 62, 63, 64, 65, 66, 67, 68, 69, 70, 71, 72, 73, 74, 75, 76, 77, 78, 79, 80, 81, 82, 83, 84, 85, 86, 87, 88, 89, 90, 91, 92, 93, 94, 95, 96, 97, 98, 99, 100, 101, 102, 103, 104, 105, 106, 107, 108, 109, 110, 111, 112, 113, 114, 115, 116, 117, 577, 579, 581, 583, 585, 587, 589, 591, 593, 595, 597, 599, 601,603, 605, 607, 609, 611,613, 615, 617, 619, 621,623, 625, 627, or 637, a variant, derivative, orthologue, paralogue or homologue thereof, in which: the amino acid at Mutated site 4 is Ala, and the amino acid at Mutated site 5 is Cys.

[0861] In another preferred embodiment, the mutated PPO comprises a sequence of SEQ ID NO: 1, 2, 3, 4, 5, 6, 7, 8, 9, 10, 11, 12, 13, 14, 15, 16, 17, 18, 19, 20, 21, 22, 23, 24, 25, 26, 27, 28, 29, 30, 31, 32, 33, 34, 35, 36, 37, 38, 39, 40, 41, 42, 43, 44, 45, 46, 47, 48, 49, 50, 51, 52, 53, 54, 55, 56, 57, 58, 59, 60, 61, 62, 63, 64, 65, 66, 67, 68, 69, 70, 71, 72, 73, 74, 75, 76, 77, 78, 79, 80, 81, 82, 83, 84, 85, 86, 87, 88, 89, 90, 91, 92, 93, 94, 95, 96, 97, 98, 99, 100, 101, 102, 103, 104, 105, 106, 107, 108, 109, 110, 111, 112, 113, 114, 115, 116, 117, 577, 579, 581, 583, 585, 587, 589, 591, 593, 595, 597, 599, 601, 603, 605, 607, 609, 611, 613, 615, 617, 619, 621, 623, 625, 627, or 637, a variant, derivative, orthologue, paralogue or homologue thereof, in which: the amino acid at Mutated site 4 is Ala, and the amino acid at Mutated site 5 is Gly.

[0862] In another preferred embodiment, the mutated PPO comprises a sequence of SEQ ID NO: 1, 2, 3, 4, 5, 6, 7, 8, 9, 10, 11, 12, 13, 14, 15, 16, 17, 18, 19, 20, 21, 22, 23, 24, 25, 26, 27, 28, 29, 30, 31, 32, 33, 34, 35, 36, 37, 38, 39, 40, 41, 42, 43, 44, 45, 46, 47, 48, 49, 50, 51, 52, 53, 54, 55, 56, 57, 58, 59, 60, 61, 62, 63, 64, 65, 66, 67, 68, 69, 70, 71, 72, 73, 74, 75, 76, 77, 78, 79, 80, 81, 82, 83, 84, 85, 86, 87, 88, 89, 90, 91, 92, 93, 94, 95, 96, 97, 98, 99, 100, 101, 102, 103, 104, 105, 106, 107, 108, 109, 110, 111, 112, 113, 114, 115, 116, 117, 577, 579, 581, 583, 585, 587, 589, 591, 593, 595, 597, 599, 601, 603, 605, 607, 609, 611, 613, 615, 617, 619, 621, 623, 625, 627, or 637, a variant, derivative, orthologue, paralogue or homologue thereof, in which: the amino acid at Mutated site 4 is Ala, and the amino acid at Mutated site 5 is Pro.

[0863] In another preferred embodiment, the mutated PPO comprises a sequence of SEQ ID NO: 1, 2, 3, 4, 5, 6, 7, 8, 9, 10, 11, 12, 13, 14, 15, 16, 17, 18, 19, 20, 21, 22, 23, 24, 25, 26, 27, 28, 29, 30, 31, 32, 33, 34, 35, 36, 37, 38, 39, 40, 41, 42, 43, 44, 45, 46, 47, 48, 49, 50, 51, 52, 53, 54, 55, 56, 57, 58, 59, 60, 61, 62, 63, 64, 65, 66, 67, 68, 69, 70, 71, 72, 73, 74, 75, 76, 77, 78, 79, 80, 81, 82, 83, 84, 85, 86, 87, 88, 89, 90, 91, 92, 93, 94, 95, 96, 97, 98, 99, 100, 101, 102, 103, 104, 105, 106, 107, 108, 109, 110, 111, 112, 113, 114, 115, 116, 117, 577, 579, 581, 583, 585, 587, 589, 591, 593, 595, 597, 599, 601, 603, 605, 607, 609, 611, 613, 615, 617, 619, 621, 623, 625, 627, or 637, a variant, derivative, orthologue, paralogue or homologue thereof, in which: the amino acid at Mutated site 4 is Ala, and the amino acid at Mutated site 5 is Arg.

[0864] In another preferred embodiment, the mutated PPO comprises a sequence of SEQ ID NO: 1, 2, 3, 4, 5, 6, 7, 8, 9, 10, 11, 12, 13, 14, 15, 16, 17, 18, 19, 20, 21, 22, 23, 24, 25, 26, 27, 28, 29, 30, 31, 32, 33, 34, 35, 36, 37, 38, 39, 40, 41, 42, 43, 44, 45, 46, 47, 48, 49, 50, 51, 52, 53, 54, 55, 56, 57, 58, 59, 60, 61, 62, 63, 64, 65, 66, 67, 68, 69, 70, 71, 72, 73, 74, 75, 76, 77, 78, 79, 80, 81, 82, 83, 84, 85, 86, 87, 88, 89, 90, 91, 92, 93, 94, 95, 96, 97, 98, 99, 100, 101, 102, 103, 104, 105, 106, 107, 108, 109, 110, 111, 112, 113, 114, 115, 116, 117, 577, 579, 581, 583, 585, 587, 589, 591, 593, 595, 597, 599, 601,603, 605, 607, 609, 611,613, 615, 617, 619, 621,623, 625, 627, or 637, a variant, derivative, orthologue, paralogue or homologue thereof, in which: the amino acid at Mutated site 4 is Ala, and the amino acid at Mutated site 5 is Tyr.

[0865] In another preferred embodiment, the mutated PPO comprises a sequence of SEQ ID NO: 1, 2, 3, 4, 5, 6, 7, 8, 9, 10, 11, 12, 13, 14, 15, 16, 17, 18, 19, 20, 21, 22, 23, 24, 25, 26, 27, 28, 29, 30, 31, 32, 33, 34, 35, 36, 37, 38, 39, 40, 41, 42, 43, 44, 45, 46, 47, 48, 49, 50, 51, 52, 53, 54, 55, 56, 57, 58, 59, 60, 61, 62, 63, 64, 65, 66, 67, 68, 69, 70, 71, 72, 73, 74, 75, 76, 77, 78, 79, 80, 81, 82, 83, 84, 85, 86, 87, 88, 89, 90, 91, 92, 93, 94, 95, 96, 97, 98, 99, 100, 101, 102, 103, 104, 105, 106, 107, 108, 109, 110, 111, 112, 113, 114, 115, 116, 117, 577, 579, 581, 583, 585, 587, 589, 591, 593, 595, 597, 599, 601, 603, 605, 607, 609, 611, 613, 615, 617, 619, 621, 623, 625, 627, or 637, a variant, derivative, orthologue, paralogue or homologue thereof, in which: the amino acid at Mutated site 4 is Ala, and the amino acid at Mutated site 5 is Trp.

[0866] In another preferred embodiment, the mutated PPO comprises a sequence of SEQ ID NO: 1, 2, 3, 4, 5, 6, 7, 8, 9, 10, 11, 12, 13, 14, 15, 16, 17, 18, 19, 20, 21, 22, 23, 24, 25, 26, 27, 28, 29, 30, 31, 32, 33, 34, 35, 36, 37, 38, 39, 40, 41, 42, 43, 44, 45, 46, 47, 48, 49, 50, 51, 52, 53, 54, 55, 56, 57, 58, 59, 60, 61, 62, 63, 64, 65, 66, 67, 68, 69, 70, 71, 72, 73, 74, 75, 76, 77, 78, 79, 80, 81, 82, 83, 84, 85, 86, 87, 88, 89, 90, 91, 92, 93, 94, 95, 96, 97, 98, 99, 100, 101, 102, 103, 104, 105, 106, 107, 108, 109, 110, 111, 112, 113, 114, 115, 116, 117, 577, 579, 581, 583, 585, 587, 589, 591, 593, 595, 597, 599, 601, 603, 605, 607, 609, 611, 613, 615, 617, 619, 621, 623, 625, 627, or 637, a variant, derivative, orthologue, paralogue or homologue thereof, in which: the amino acid at Mutated site 4 is Arg, and the amino acid at Mutated site 5 is Ala.

[0867] In another preferred embodiment, the mutated PPO comprises a sequence of SEQ ID NO: 1, 2, 3, 4, 5, 6, 7, 8, 9, 10, 11, 12, 13, 14, 15, 16, 17, 18, 19, 20, 21, 22, 23, 24, 25, 26, 27, 28, 29, 30, 31, 32, 33, 34, 35, 36, 37, 38, 39, 40, 41, 42, 43, 44, 45, 46, 47, 48, 49, 50, 51, 52, 53, 54, 55, 56, 57, 58, 59, 60, 61, 62, 63, 64, 65, 66, 67, 68, 69, 70, 71, 72, 73, 74, 75, 76, 77, 78, 79, 80, 81, 82, 83, 84, 85, 86, 87, 88, 89, 90, 91, 92, 93, 94, 95, 96, 97, 98, 99, 100, 101, 102, 103, 104, 105, 106, 107, 108, 109, 110, 111, 112, 113, 114, 115, 116, 117, 577, 579, 581, 583, 585, 587, 589, 591, 593, 595, 597, 599, 601, 603, 605, 607, 609, 611, 613, 615, 617, 619, 621, 623, 625, 627, or 637, a variant, derivative, orthologue, paralogue or homologue thereof, in which: the amino acid at Mutated site 4 is Arg, and the amino acid at Mutated site 5 is Leu.

[0868] In another preferred embodiment, the mutated PPO comprises a sequence of SEQ ID NO: 1, 2, 3, 4, 5, 6, 7, 8, 9, 10, 11, 12, 13, 14, 15, 16, 17, 18, 19, 20, 21, 22, 23, 24, 25, 26, 27, 28, 29, 30, 31, 32, 33, 34, 35, 36, 37, 38, 39, 40, 41, 42, 43, 44, 45, 46, 47, 48, 49, 50, 51, 52, 53, 54, 55, 56, 57, 58, 59, 60, 61, 62, 63, 64, 65, 66, 67, 68, 69, 70, 71, 72, 73, 74, 75, 76, 77, 78, 79, 80, 81, 82, 83, 84, 85, 86, 87, 88, 89, 90, 91, 92, 93, 94, 95, 96, 97, 98, 99, 100, 101, 102, 103, 104, 105, 106, 107, 108, 109, 110, 111, 112, 113, 114, 115, 116, 117, 577, 579, 581, 583, 585, 587, 589, 591, 593, 595, 597, 599, 601, 603, 605, 607, 609, 611, 613, 615, 617, 619, 621, 623, 625, 627, or 637, a variant, derivative, orthologue, paralogue or homologue thereof, in which: the amino acid at Mutated site 4 is Arg, and the amino acid at Mutated site 5 is Val.

[0869] In another preferred embodiment, the mutated PPO comprises a sequence of SEQ ID NO: 1, 2, 3, 4, 5, 6, 7, 8, 9, 10, 11, 12, 13, 14, 15, 16, 17, 18, 19, 20, 21, 22, 23, 24, 25, 26, 27, 28, 29, 30, 31, 32, 33, 34, 35, 36, 37, 38, 39, 40, 41, 42, 43, 44, 45, 46, 47, 48, 49, 50, 51, 52, 53, 54, 55, 56, 57, 58, 59, 60, 61, 62, 63, 64, 65, 66, 67, 68, 69, 70, 71, 72, 73, 74, 75, 76, 77, 78, 79, 80, 81, 82, 83, 84, 85, 86, 87, 88, 89, 90, 91, 92, 93, 94, 95, 96, 97, 98, 99, 100, 101, 102, 103, 104, 105, 106, 107, 108, 109, 110, 111, 112, 113, 114, 115, 116, 117, 577, 579, 581, 583, 585, 587, 589, 591, 593, 595, 597, 599, 601, 603, 605, 607, 609, 611, 613, 615, 617, 619, 621, 623, 625, 627, or 637, a variant, derivative, orthologue, paralogue or homologue thereof, in which: the amino acid at Mutated site 4 is Arg, and the amino acid at Mutated site 5 is Ile.

[0870] In another preferred embodiment, the mutated PPO comprises a sequence of SEQ ID NO: 1, 2, 3, 4, 5, 6, 7, 8, 9, 10, 11, 12, 13, 14, 15, 16, 17, 18, 19, 20, 21, 22, 23, 24, 25, 26, 27, 28, 29, 30, 31, 32, 33, 34, 35, 36, 37, 38, 39, 40, 41, 42, 43, 44, 45, 46, 47, 48, 49, 50, 51, 52, 53, 54, 55, 56, 57, 58, 59, 60, 61, 62, 63, 64, 65, 66, 67, 68, 69, 70, 71, 72, 73, 74, 75, 76, 77, 78, 79, 80, 81, 82, 83, 84, 85, 86, 87, 88, 89, 90, 91, 92, 93, 94, 95, 96, 97, 98, 99, 100, 101, 102, 103, 104, 105, 106, 107, 108, 109, 110, 111, 112, 113, 114, 115, 116, 117, 577, 579, 581, 583, 585, 587, 589, 591, 593, 595, 597, 599, 601, 603, 605, 607, 609, 611, 613, 615, 617, 619, 621, 623, 625, 627, or 637, a variant, derivative, orthologue, paralogue or homologue thereof, in which: the amino acid at Mutated site 4 is Arg, and the amino acid at Mutated site 5 is Met.

[0871] In another preferred embodiment, the mutated PPO comprises a sequence of SEQ ID NO: 1, 2, 3, 4, 5, 6, 7, 8, 9, 10, 11, 12, 13, 14, 15, 16, 17, 18, 19, 20, 21, 22, 23, 24, 25, 26, 27, 28, 29, 30, 31, 32, 33, 34, 35, 36, 37, 38, 39, 40, 41, 42, 43, 44, 45, 46, 47, 48, 49, 50, 51, 52, 53, 54, 55, 56, 57, 58, 59, 60, 61, 62, 63, 64, 65, 66, 67, 68, 69, 70, 71, 72, 73, 74, 75, 76, 77, 78, 79, 80, 81, 82, 83, 84, 85, 86, 87, 88, 89, 90, 91, 92, 93, 94, 95, 96, 97, 98, 99, 100, 101, 102, 103, 104, 105, 106, 107, 108, 109, 110, 111, 112, 113, 114, 115, 116, 117, 577, 579, 581, 583, 585, 587, 589, 591, 593, 595, 597, 599, 601, 603, 605, 607, 609, 611, 613, 615, 617, 619, 621, 623, 625, 627, or 637, a variant, derivative, orthologue, paralogue or homologue thereof, in which: the amino acid at Mutated site 4 is Arg, and the amino acid at Mutated site 5 is His.

[0872] In another preferred embodiment, the mutated PPO comprises a sequence of SEQ ID NO: 1, 2, 3, 4, 5, 6, 7, 8, 9, 10, 11, 12, 13, 14, 15, 16, 17, 18, 19, 20, 21, 22, 23, 24, 25, 26, 27, 28, 29, 30, 31, 32, 33, 34, 35, 36, 37, 38, 39, 40, 41, 42, 43, 44, 45, 46, 47, 48, 49, 50, 51, 52, 53, 54, 55, 56, 57, 58, 59, 60, 61, 62, 63, 64, 65, 66, 67, 68, 69, 70, 71, 72, 73, 74, 75, 76, 77, 78, 79, 80, 81, 82, 83, 84, 85, 86, 87, 88, 89, 90, 91, 92, 93, 94, 95, 96, 97, 98, 99, 100, 101, 102, 103, 104, 105, 106, 107, 108, 109, 110, 111, 112, 113, 114, 115, 116, 117, 577, 579, 581, 583, 585, 587, 589, 591, 593, 595, 597, 599, 601, 603, 605, 607, 609, 611, 613, 615, 617, 619, 621, 623, 625, 627, or 637, a variant, derivative, orthologue, paralogue or homologue thereof, in which: the amino acid at Mutated site 4 is Arg, and the amino acid at Mutated site 5 is Lys.

[0873] In another preferred embodiment, the mutated PPO comprises a sequence of SEQ ID NO: 1, 2, 3, 4, 5, 6, 7, 8, 9, 10, 11, 12, 13, 14, 15, 16, 17, 18, 19, 20, 21, 22, 23, 24, 25, 26, 27, 28, 29, 30, 31, 32, 33, 34, 35, 36, 37, 38, 39, 40, 41, 42, 43, 44, 45, 46, 47, 48, 49, 50, 51, 52, 53, 54, 55, 56, 57, 58, 59, 60, 61, 62, 63, 64, 65, 66, 67, 68, 69, 70, 71, 72, 73, 74, 75, 76, 77, 78, 79, 80, 81, 82, 83, 84, 85, 86, 87, 88, 89, 90, 91, 92, 93, 94, 95, 96, 97, 98, 99, 100, 101, 102, 103, 104, 105, 106, 107, 108, 109, 110, 111, 112, 113, 114, 115, 116, 117, 577, 579, 581, 583, 585, 587, 589, 591, 593, 595, 597, 599, 601, 603, 605, 607, 609, 611, 613, 615, 617, 619, 621, 623, 625, 627, or 637, a variant, derivative, orthologue, paralogue or homologue thereof, in which: the amino acid at Mutated site 4 is Arg, and the amino acid at Mutated site 5 is Asp.

[0874] In another preferred embodiment, the mutated PPO comprises a sequence of SEQ ID NO: 1, 2, 3, 4, 5, 6, 7, 8, 9, 10, 11, 12, 13, 14, 15, 16, 17, 18, 19, 20, 21, 22, 23, 24, 25, 26, 27, 28, 29, 30, 31, 32, 33, 34, 35, 36, 37, 38, 39, 40, 41, 42, 43, 44, 45, 46, 47, 48, 49, 50, 51, 52, 53, 54, 55, 56, 57, 58, 59, 60, 61, 62, 63, 64, 65, 66, 67, 68, 69, 70, 71, 72, 73, 74, 75, 76, 77, 78, 79, 80, 81, 82, 83, 84, 85, 86, 87, 88, 89, 90, 91, 92, 93, 94, 95, 96, 97, 98, 99, 100, 101, 102, 103, 104, 105, 106, 107, 108, 109, 110, 111, 112, 113, 114, 115, 116, 117, 577, 579, 581, 583, 585, 587, 589, 591, 593, 595, 597, 599, 601, 603, 605, 607, 609, 611, 613, 615, 617, 619, 621, 623, 625, 627, or 637, a variant, derivative, orthologue, paralogue or homologue thereof, in which: the amino acid at Mutated site 4 is Arg, and the amino acid at Mutated site 5 is Glu.

[0875] In another preferred embodiment, the mutated PPO comprises a sequence of SEQ ID NO: 1, 2, 3, 4, 5, 6, 7, 8, 9, 10, 11, 12, 13, 14, 15, 16, 17, 18, 19, 20, 21, 22, 23, 24, 25, 26, 27, 28, 29, 30, 31, 32, 33, 34, 35, 36, 37, 38, 39, 40, 41, 42, 43, 44, 45, 46, 47, 48, 49, 50, 51, 52, 53, 54, 55, 56, 57, 58, 59, 60, 61, 62, 63, 64, 65, 66, 67, 68, 69, 70, 71, 72, 73, 74, 75, 76, 77, 78, 79, 80, 81, 82, 83, 84, 85, 86, 87, 88, 89, 90, 91, 92, 93, 94, 95, 96, 97, 98, 99, 100, 101, 102, 103, 104, 105, 106, 107, 108, 109, 110, 111, 112, 113, 114, 115, 116, 117, 577, 579, 581, 583, 585, 587, 589, 591, 593, 595, 597, 599, 601, 603, 605, 607, 609, 611, 613, 615, 617, 619, 621, 623, 625, 627, or 637, a variant, derivative, orthologue, paralogue or homologue thereof, in which: the amino acid at Mutated site 4 is Arg, and the amino acid at Mutated site 5 is Ser.

[0876] In another preferred embodiment, the mutated PPO comprises a sequence of SEQ ID NO: 1, 2, 3, 4, 5, 6, 7, 8, 9, 10, 11, 12, 13, 14, 15, 16, 17, 18, 19, 20, 21, 22, 23, 24, 25, 26, 27, 28, 29, 30, 31, 32, 33, 34, 35, 36, 37, 38, 39, 40, 41, 42, 43, 44, 45, 46, 47, 48, 49, 50, 51, 52, 53, 54, 55, 56, 57, 58, 59, 60, 61, 62, 63, 64, 65, 66, 67, 68, 69, 70, 71, 72, 73, 74, 75, 76, 77, 78, 79, 80, 81, 82, 83, 84, 85, 86, 87, 88, 89, 90, 91, 92, 93, 94, 95, 96, 97, 98, 99, 100, 101, 102, 103, 104, 105, 106, 107, 108, 109, 110, 111, 112, 113, 114, 115, 116, 117, 577, 579, 581, 583, 585, 587, 589, 591, 593, 595, 597, 599, 601, 603, 605, 607, 609, 611, 613, 615, 617, 619, 621, 623, 625, 627, or 637, a variant, derivative, orthologue, paralogue or homologue thereof, in which: the amino acid at Mutated site 4 is Arg, and the amino acid at Mutated site 5 is Thr.

[0877] In another preferred embodiment, the mutated PPO comprises a sequence of SEQ ID NO: 1, 2, 3, 4, 5, 6, 7, 8, 9, 10, 11, 12, 13, 14, 15, 16, 17, 18, 19, 20, 21, 22, 23, 24, 25, 26, 27, 28, 29, 30, 31, 32, 33, 34, 35, 36, 37, 38, 39, 40, 41, 42, 43, 44, 45, 46, 47, 48, 49, 50, 51, 52, 53, 54, 55, 56, 57, 58, 59, 60, 61, 62, 63, 64, 65, 66, 67, 68, 69, 70, 71, 72, 73, 74, 75, 76, 77, 78, 79, 80, 81, 82, 83, 84, 85, 86, 87, 88, 89, 90, 91, 92, 93, 94, 95, 96, 97, 98, 99, 100, 101, 102, 103, 104, 105, 106, 107, 108, 109, 110, 111, 112, 113, 114, 115, 116, 117, 577, 579, 581, 583, 585, 587, 589, 591, 593, 595, 597, 599, 601, 603, 605, 607, 609, 611, 613, 615, 617, 619, 621, 623, 625, 627, or 637, a variant, derivative, orthologue, paralogue or homologue thereof, in which: the amino acid at Mutated site 4 is Arg, and the amino acid at Mutated site 5 is Asn.

[0878] In another preferred embodiment, the mutated PPO comprises a sequence of SEQ ID NO: 1, 2, 3, 4, 5, 6, 7, 8, 9, 10, 11, 12, 13, 14, 15, 16, 17, 18, 19, 20, 21, 22, 23, 24, 25, 26, 27, 28, 29, 30, 31, 32, 33, 34, 35, 36, 37, 38, 39, 40, 41, 42, 43, 44, 45, 46, 47, 48, 49, 50, 51, 52, 53, 54, 55, 56, 57, 58, 59, 60, 61, 62, 63, 64, 65, 66, 67, 68, 69, 70, 71, 72, 73, 74, 75, 76, 77, 78, 79, 80, 81, 82, 83, 84, 85, 86, 87, 88, 89, 90, 91, 92, 93, 94, 95, 96, 97, 98, 99, 100, 101, 102, 103, 104, 105, 106, 107, 108, 109, 110, 111, 112, 113, 114, 115, 116, 117, 577, 579, 581, 583, 585, 587, 589, 591, 593, 595, 597, 599, 601, 603, 605, 607, 609, 611, 613, 615, 617, 619, 621, 623, 625, 627, or 637, a variant, derivative, orthologue, paralogue or homologue thereof, in which: the amino acid at Mutated site 4 is Arg, and the amino acid at Mutated site 5 is Gln.

[0879] In another preferred embodiment, the mutated PPO comprises a sequence of SEQ ID NO: 1, 2, 3, 4, 5, 6, 7, 8, 9, 10, 11, 12, 13, 14, 15, 16, 17, 18, 19, 20, 21, 22, 23, 24, 25, 26, 27, 28, 29, 30, 31, 32, 33, 34, 35, 36, 37, 38, 39, 40, 41, 42, 43, 44, 45, 46, 47, 48, 49, 50, 51, 52, 53, 54, 55, 56, 57, 58, 59, 60, 61, 62, 63, 64, 65, 66, 67, 68, 69, 70, 71, 72, 73, 74, 75, 76, 77, 78, 79, 80, 81, 82, 83, 84, 85, 86, 87, 88, 89, 90, 91, 92, 93, 94, 95, 96, 97, 98, 99, 100, 101, 102, 103, 104, 105, 106, 107, 108, 109, 110, 111, 112, 113, 114, 115, 116, 117, 577, 579, 581, 583, 585, 587, 589, 591, 593, 595, 597, 599, 601, 603, 605, 607, 609, 611, 613, 615, 617, 619, 621, 623, 625, 627, or 637, a variant, derivative, orthologue, paralogue or homologue thereof, in which: the amino acid at Mutated site 4 is Arg, and the amino acid at Mutated site 5 is Cys.

[0880] In another preferred embodiment, the mutated PPO comprises a sequence of SEQ ID NO: 1, 2, 3, 4, 5, 6, 7, 8, 9, 10, 11, 12, 13, 14, 15, 16, 17, 18, 19, 20, 21, 22, 23, 24, 25, 26, 27, 28, 29, 30, 31, 32, 33, 34, 35, 36, 37, 38, 39, 40, 41, 42, 43, 44, 45, 46, 47, 48, 49, 50, 51, 52, 53, 54, 55, 56, 57, 58, 59, 60, 61, 62, 63, 64, 65, 66, 67, 68, 69, 70, 71, 72, 73, 74, 75, 76, 77, 78, 79, 80, 81, 82, 83, 84, 85, 86, 87, 88, 89, 90, 91, 92, 93, 94, 95, 96, 97, 98, 99, 100, 101, 102, 103, 104, 105, 106, 107, 108, 109, 110, 111, 112, 113, 114, 115, 116, 117, 577, 579, 581, 583, 585, 587, 589, 591, 593, 595, 597, 599, 601, 603, 605, 607, 609, 611, 613, 615, 617, 619, 621, 623, 625, 627, or 637, a variant, derivative, orthologue, paralogue or homologue thereof, in which: the amino acid at Mutated site 4 is Arg, and the amino acid at Mutated site 5 is Gly.

[0881] In another preferred embodiment, the mutated PPO comprises a sequence of SEQ ID NO: 1, 2, 3, 4, 5, 6, 7, 8, 9, 10, 11, 12, 13, 14, 15, 16, 17, 18, 19, 20, 21, 22, 23, 24, 25, 26, 27, 28, 29, 30, 31, 32, 33, 34, 35, 36, 37, 38, 39, 40, 41, 42, 43, 44, 45, 46, 47, 48, 49, 50, 51, 52, 53, 54, 55, 56, 57, 58, 59, 60, 61, 62, 63, 64, 65, 66, 67, 68, 69, 70, 71, 72, 73, 74, 75, 76, 77, 78, 79, 80, 81, 82, 83, 84, 85, 86, 87, 88, 89, 90, 91, 92, 93, 94, 95, 96, 97, 98, 99, 100, 101, 102, 103, 104, 105, 106, 107, 108, 109, 110, 111, 112, 113, 114, 115, 116, 117, 577, 579, 581, 583, 585, 587, 589, 591, 593, 595, 597, 599, 601, 603, 605, 607, 609, 611, 613, 615, 617, 619, 621, 623, 625, 627, or 637, a variant, derivative, orthologue, paralogue or homologue thereof, in which: the amino acid at Mutated site 4 is Arg, and the amino acid at Mutated site 5 is Pro.

[0882] In another preferred embodiment, the mutated PPO comprises a sequence of SEQ ID NO: 1, 2, 3, 4, 5, 6, 7, 8, 9, 10, 11, 12, 13, 14, 15, 16, 17, 18, 19, 20, 21, 22, 23, 24, 25, 26, 27, 28, 29, 30, 31, 32, 33, 34, 35, 36, 37, 38, 39, 40, 41, 42, 43, 44, 45, 46, 47, 48, 49, 50, 51, 52, 53, 54, 55, 56, 57, 58, 59, 60, 61, 62, 63, 64, 65, 66, 67, 68, 69, 70, 71, 72, 73, 74, 75, 76, 77, 78, 79, 80, 81, 82, 83, 84, 85, 86, 87, 88, 89, 90, 91, 92, 93, 94, 95, 96, 97, 98, 99, 100, 101, 102, 103, 104, 105, 106, 107, 108,109, 110, 111, 112, 113, 114, 115, 116, 117, 577, 579, 581, 583, 585, 587, 589, 591, 593, 595, 597, 599, 601, 603, 605, 607, 609, 611, 613, 615, 617, 619, 621, 623, 625, 627, or 637, a variant, derivative, orthologue, paralogue or homologue thereof, in which: the amino acid at Mutated site 4 is Arg, and the amino acid at Mutated site 5 is Arg.

[0883] In another preferred embodiment, the mutated PPO comprises a sequence of SEQ ID NO: 1, 2, 3, 4, 5, 6, 7, 8, 9, 10, 11, 12, 13, 14, 15, 16, 17, 18, 19, 20, 21, 22, 23, 24, 25, 26, 27, 28, 29, 30, 31, 32, 33, 34, 35, 36, 37, 38, 39, 40, 41, 42, 43, 44, 45, 46, 47, 48, 49, 50, 51, 52, 53, 54, 55, 56, 57, 58, 59, 60, 61, 62, 63, 64, 65, 66, 67, 68, 69, 70, 71, 72, 73, 74, 75, 76, 77, 78, 79, 80, 81, 82, 83, 84, 85, 86, 87, 88, 89, 90, 91, 92, 93, 94, 95, 96, 97, 98, 99, 100, 101, 102, 103, 104, 105, 106, 107, 108, 109, 110, 111, 112, 113, 114, 115, 116, 117, 577, 579, 581, 583, 585, 587, 589, 591, 593, 595, 597, 599, 601, 603, 605, 607, 609, 611, 613, 615, 617, 619, 621, 623, 625, 627, or 637, a variant, derivative, orthologue, paralogue or homologue thereof, in which: the amino acid at Mutated site 4 is Arg, and the amino acid at Mutated site 5 is Tyr.

[0884] In another preferred embodiment, the mutated PPO comprises a sequence of SEQ ID NO: 1, 2, 3, 4, 5, 6, 7, 8, 9, 10, 11, 12, 13, 14, 15, 16, 17, 18, 19, 20, 21, 22, 23, 24, 25, 26, 27, 28, 29, 30, 31, 32, 33, 34, 35, 36, 37, 38, 39, 40, 41, 42, 43, 44, 45, 46, 47, 48, 49, 50, 51, 52, 53, 54, 55, 56, 57, 58, 59, 60, 61, 62, 63, 64, 65, 66, 67, 68, 69, 70, 71, 72, 73, 74, 75, 76, 77, 78, 79, 80, 81, 82, 83, 84, 85, 86, 87, 88, 89, 90, 91, 92, 93, 94, 95, 96, 97, 98, 99, 100, 101, 102, 103, 104, 105, 106, 107, 108, 109, 110, 111, 112, 113, 114, 115, 116, 117, 577, 579, 581, 583, 585, 587, 589, 591, 593, 595, 597, 599, 601, 603, 605, 607, 609, 611, 613, 615, 617, 619, 621, 623, 625, 627, or 637, a variant, derivative, orthologue, paralogue or homologue thereof, in which: the amino acid at Mutated site 4 is Arg, and the amino acid at Mutated site 5 is Trp.

[0885] In another preferred embodiment, the mutated PPO comprises a sequence of SEQ ID NO: 1, 2, 3, 4, 5, 6, 7, 8, 9, 10, 11, 12, 13, 14, 15, 16, 17, 18, 19, 20, 21, 22, 23, 24, 25, 26, 27, 28, 29, 30, 31, 32, 33, 34, 35, 36, 37, 38, 39, 40, 41, 42, 43, 44, 45, 46, 47, 48, 49, 50, 51, 52, 53, 54, 55, 56, 57, 58, 59, 60, 61, 62, 63, 64, 65, 66, 67, 68, 69, 70, 71, 72, 73, 74, 75, 76, 77, 78, 79, 80, 81, 82, 83, 84, 85, 86, 87, 88, 89, 90, 91, 92, 93, 94, 95, 96, 97, 98, 99, 100, 101, 102, 103, 104, 105, 106, 107, 108, 109, 110, 111, 112, 113, 114, 115, 116, 117, 577, 579, 581, 583, 585, 587, 589, 591, 593, 595, 597, 599, 601, 603, 605, 607, 609, 611, 613, 615, 617, 619, 621, 623, 625, 627, or 637, a variant, derivative, orthologue, paralogue or homologue thereof, in which: the amino acid at Mutated site 4 is Val, and the amino acid at Mutated site 5 is Ala.

[0886] In another preferred embodiment, the mutated PPO comprises a sequence of SEQ ID NO: 1, 2, 3, 4, 5, 6, 7, 8, 9, 10, 11, 12, 13, 14, 15, 16, 17, 18, 19, 20, 21, 22, 23, 24, 25, 26, 27, 28, 29, 30, 31, 32, 33, 34, 35, 36, 37, 38, 39, 40, 41, 42, 43, 44, 45, 46, 47, 48, 49, 50, 51, 52, 53, 54, 55, 56, 57, 58, 59, 60, 61, 62, 63, 64, 65, 66, 67, 68, 69, 70, 71, 72, 73, 74, 75, 76, 77, 78, 79, 80, 81, 82, 83, 84, 85, 86, 87, 88, 89, 90, 91, 92, 93, 94, 95, 96, 97, 98, 99, 100, 101, 102, 103, 104, 105, 106, 107, 108, 109, 110, 111, 112, 113, 114, 115, 116, 117, 577, 579, 581, 583, 585, 587, 589, 591, 593, 595, 597, 599, 601, 603, 605, 607, 609, 611, 613, 615, 617, 619, 621, 623, 625, 627, or 637, a variant, derivative, orthologue, paralogue or homologue thereof, in which: the amino acid at Mutated site 4 is Val, and the amino acid at Mutated site 5 is Leu.

[0887] In another preferred embodiment, the mutated PPO comprises a sequence of SEQ ID NO: 1, 2, 3, 4, 5, 6, 7, 8, 9, 10, 11, 12, 13, 14, 15, 16, 17, 18, 19, 20, 21, 22, 23, 24, 25, 26, 27, 28, 29, 30, 31, 32, 33, 34, 35, 36, 37, 38, 39, 40, 41, 42, 43, 44, 45, 46, 47, 48, 49, 50, 51, 52, 53, 54, 55, 56, 57, 58, 59, 60, 61, 62, 63, 64, 65, 66, 67, 68, 69, 70, 71, 72, 73, 74, 75, 76, 77, 78, 79, 80, 81, 82, 83, 84, 85, 86, 87, 88, 89, 90, 91, 92, 93, 94, 95, 96, 97, 98, 99, 100, 101, 102, 103, 104, 105, 106, 107, 108, 109, 110, 111, 112, 113, 114, 115, 116, 117, 577, 579, 581, 583, 585, 587, 589, 591, 593, 595, 597, 599, 601, 603, 605, 607, 609, 611, 613, 615, 617, 619, 621, 623, 625, 627, or 637, a variant, derivative, orthologue, paralogue or homologue thereof, in which: the amino acid at Mutated site 4 is Val, and the amino acid at Mutated site 5 is Val.

[0888] In another preferred embodiment, the mutated PPO comprises a sequence of SEQ ID NO: 1, 2, 3, 4, 5, 6, 7, 8, 9, 10, 11, 12, 13, 14, 15, 16, 17, 18, 19, 20, 21, 22, 23, 24, 25, 26, 27, 28, 29, 30, 31, 32, 33, 34, 35, 36, 37, 38, 39, 40, 41, 42, 43, 44, 45, 46, 47, 48, 49, 50, 51, 52, 53, 54, 55, 56, 57, 58, 59, 60, 61, 62, 63, 64, 65, 66, 67, 68, 69, 70, 71, 72, 73, 74, 75, 76, 77, 78, 79, 80, 81, 82, 83, 84, 85, 86, 87, 88, 89, 90, 91, 92, 93, 94, 95, 96, 97, 98, 99, 100, 101, 102, 103, 104, 105, 106, 107, 108, 109, 110, 111, 112, 113, 114, 115, 116, 117, 577, 579, 581, 583, 585, 587, 589, 591, 593, 595, 597, 599, 601, 603, 605, 607, 609, 611, 613, 615, 617, 619, 621, 623, 625, 627, or 637, a variant, derivative, orthologue, paralogue or homologue thereof, in which: the amino acid at Mutated site 4 is Val, and the amino acid at Mutated site 5 is Ile.

[0889] In another preferred embodiment, the mutated PPO comprises a sequence of SEQ ID NO: 1, 2, 3, 4, 5, 6, 7, 8, 9, 10, 11, 12, 13, 14, 15, 16, 17, 18, 19, 20, 21, 22, 23, 24, 25, 26, 27, 28, 29, 30, 31, 32, 33, 34, 35, 36, 37, 38, 39, 40, 41, 42, 43, 44, 45, 46, 47, 48, 49, 50, 51, 52, 53, 54, 55, 56, 57, 58, 59, 60, 61, 62, 63, 64, 65, 66, 67, 68, 69, 70, 71, 72, 73, 74, 75, 76, 77, 78, 79, 80, 81, 82, 83, 84, 85, 86, 87, 88, 89, 90, 91, 92, 93, 94, 95, 96, 97, 98, 99, 100, 101, 102, 103, 104, 105, 106, 107, 108, 109, 110, 111, 112, 113, 114, 115, 116, 117, 577, 579, 581, 583, 585, 587, 589, 591, 593, 595, 597, 599, 601, 603, 605, 607, 609, 611, 613, 615, 617, 619, 621, 623, 625, 627, or 637, a variant, derivative, orthologue, paralogue or homologue thereof, in which: the amino acid at Mutated site 4 is Val, and the amino acid at Mutated site 5 is Met.

[0890] In another preferred embodiment, the mutated PPO comprises a sequence of SEQ ID NO: 1, 2, 3, 4, 5, 6, 7, 8, 9, 10, 11, 12, 13, 14, 15, 16, 17, 18, 19, 20, 21, 22, 23, 24, 25, 26, 27, 28, 29, 30, 31, 32, 33, 34, 35, 36, 37, 38, 39, 40, 41, 42, 43, 44, 45, 46, 47, 48, 49, 50, 51, 52, 53, 54, 55, 56, 57, 58, 59, 60, 61, 62, 63, 64, 65, 66, 67, 68, 69, 70, 71, 72, 73, 74, 75, 76, 77, 78, 79, 80, 81, 82, 83, 84, 85, 86, 87, 88, 89, 90, 91, 92, 93, 94, 95, 96, 97, 98, 99, 100, 101, 102, 103, 104, 105, 106, 107, 108, 109, 110, 111, 112, 113, 114, 115, 116, 117, 577, 579, 581, 583, 585, 587, 589, 591, 593, 595, 597, 599, 601, 603, 605, 607, 609, 611, 613, 615, 617, 619, 621, 623, 625, 627, or 637, a variant, derivative, orthologue, paralogue or homologue thereof, in which: the amino acid at Mutated site 4 is Val, and the amino acid at Mutated site 5 is His.

[0891] In another preferred embodiment, the mutated PPO comprises a sequence of SEQ ID NO: 1, 2, 3, 4, 5, 6, 7, 8, 9, 10, 11, 12, 13, 14, 15, 16, 17, 18, 19, 20, 21, 22, 23, 24, 25, 26, 27, 28, 29, 30, 31, 32, 33, 34, 35, 36, 37, 38, 39, 40, 41, 42, 43, 44, 45, 46, 47, 48, 49, 50, 51, 52, 53, 54, 55, 56, 57, 58, 59, 60, 61, 62, 63, 64, 65, 66, 67, 68, 69, 70, 71, 72, 73, 74, 75, 76, 77, 78, 79, 80, 81, 82, 83, 84, 85, 86, 87, 88, 89, 90, 91, 92, 93, 94, 95, 96, 97, 98, 99, 100, 101, 102, 103, 104, 105, 106, 107, 108, 109, 110, 111, 112, 113, 114, 115, 116, 117, 577, 579, 581, 583, 585, 587, 589, 591, 593, 595, 597, 599, 601, 603, 605, 607, 609, 611, 613, 615, 617, 619, 621, 623, 625, 627, or 637, a variant, derivative, orthologue, paralogue or homologue thereof, in which: the amino acid at Mutated site 4 is Val, and the amino acid at Mutated site 5 is Lys.

[0892] In another preferred embodiment, the mutated PPO comprises a sequence of SEQ ID NO: 1, 2, 3, 4, 5, 6, 7, 8, 9, 10, 11, 12, 13, 14, 15, 16, 17, 18, 19, 20, 21, 22, 23, 24, 25, 26, 27, 28, 29, 30, 31, 32, 33, 34, 35, 36, 37, 38, 39, 40, 41, 42, 43, 44, 45, 46, 47, 48, 49, 50, 51, 52, 53, 54, 55, 56, 57, 58, 59, 60, 61, 62, 63, 64, 65, 66, 67, 68, 69, 70, 71, 72, 73, 74, 75, 76, 77, 78, 79, 80, 81, 82, 83, 84, 85, 86, 87, 88, 89, 90, 91, 92, 93, 94, 95, 96, 97, 98, 99, 100, 101, 102, 103, 104, 105, 106, 107, 108, 109, 110, 111, 112, 113, 114, 115, 116, 117, 577, 579, 581, 583, 585, 587, 589, 591, 593, 595, 597, 599, 601, 603, 605, 607, 609, 611, 613, 615, 617, 619, 621, 623, 625, 627, or 637, a variant, derivative, orthologue, paralogue or homologue thereof, in which: the amino acid at Mutated site 4 is Val, and the amino acid at Mutated site 5 is Asp.

[0893] In another preferred embodiment, the mutated PPO comprises a sequence of SEQ ID NO: 1, 2, 3, 4, 5, 6, 7, 8, 9, 10, 11, 12, 13, 14, 15, 16, 17, 18, 19, 20, 21, 22, 23, 24, 25, 26, 27, 28, 29, 30, 31, 32, 33, 34, 35, 36, 37, 38, 39, 40, 41, 42, 43, 44, 45, 46, 47, 48, 49, 50, 51, 52, 53, 54, 55, 56, 57, 58, 59, 60, 61, 62, 63, 64, 65, 66, 67, 68, 69, 70, 71, 72, 73, 74, 75, 76, 77, 78, 79, 80, 81, 82, 83, 84, 85, 86, 87, 88, 89, 90, 91, 92, 93, 94, 95, 96, 97, 98, 99, 100, 101, 102, 103, 104, 105, 106, 107, 108, 109, 110, 111, 112, 113, 114, 115, 116, 117, 577, 579, 581, 583, 585, 587, 589, 591, 593, 595, 597, 599, 601,603, 605, 607, 609, 611,613, 615, 617, 619, 621,623, 625, 627, or 637, a variant, derivative, orthologue, paralogue or homologue thereof, in which: the amino acid at Mutated site 4 is Val, and the amino acid at Mutated site 5 is Glu.

[0894] In another preferred embodiment, the mutated PPO comprises a sequence of SEQ ID NO: 1, 2, 3, 4, 5, 6, 7, 8, 9, 10, 11, 12, 13, 14, 15, 16, 17, 18, 19, 20, 21, 22, 23, 24, 25, 26, 27, 28, 29, 30, 31, 32, 33, 34, 35, 36, 37, 38, 39, 40, 41, 42, 43, 44, 45, 46, 47, 48, 49, 50, 51, 52, 53, 54, 55, 56, 57, 58, 59, 60, 61, 62, 63, 64, 65, 66, 67, 68, 69, 70, 71, 72, 73, 74, 75, 76, 77, 78, 79, 80, 81, 82, 83, 84, 85, 86, 87, 88, 89, 90, 91, 92, 93, 94, 95, 96, 97, 98, 99, 100, 101, 102, 103, 104, 105, 106, 107, 108, 109, 110, 111, 112, 113, 114, 115, 116, 117, 577, 579, 581, 583, 585, 587, 589, 591, 593, 595, 597, 599, 601, 603, 605, 607, 609, 611, 613, 615, 617, 619, 621, 623, 625, 627, or 637, a variant, derivative, orthologue, paralogue or homologue thereof, in which: the amino acid at Mutated site 4 is Val, and the amino acid at Mutated site 5 is Ser.

[0895] In another preferred embodiment, the mutated PPO comprises a sequence of SEQ ID NO: 1, 2, 3, 4, 5, 6, 7, 8, 9, 10, 11, 12, 13, 14, 15, 16, 17, 18, 19, 20, 21, 22, 23, 24, 25, 26, 27, 28, 29, 30, 31, 32, 33, 34, 35, 36, 37, 38, 39, 40, 41, 42, 43, 44, 45, 46, 47, 48, 49, 50, 51, 52, 53, 54, 55, 56, 57, 58, 59, 60, 61, 62, 63, 64, 65, 66, 67, 68, 69, 70, 71, 72, 73, 74, 75, 76, 77, 78, 79, 80, 81, 82, 83, 84, 85, 86, 87, 88, 89, 90, 91, 92, 93, 94, 95, 96, 97, 98, 99, 100, 101, 102, 103, 104, 105, 106, 107, 108, 109, 110, 111, 112, 113, 114, 115, 116, 117, 577, 579, 581, 583, 585, 587, 589, 591, 593, 595, 597, 599, 601, 603, 605, 607, 609, 611, 613, 615, 617, 619, 621, 623, 625, 627, or 637, a variant, derivative, orthologue, paralogue or homologue thereof, in which: the amino acid at Mutated site 4 is Val, and the amino acid at Mutated site 5 is Thr.

[0896] In another preferred embodiment, the mutated PPO comprises a sequence of SEQ ID NO: 1, 2, 3, 4, 5, 6, 7, 8, 9, 10, 11, 12, 13, 14, 15, 16, 17, 18, 19, 20, 21, 22, 23, 24, 25, 26, 27, 28, 29, 30, 31, 32, 33, 34, 35, 36, 37, 38, 39, 40, 41, 42, 43, 44, 45, 46, 47, 48, 49, 50, 51, 52, 53, 54, 55, 56, 57, 58, 59, 60, 61, 62, 63, 64, 65, 66, 67, 68, 69, 70, 71, 72, 73, 74, 75, 76, 77, 78, 79, 80, 81, 82, 83, 84, 85, 86, 87, 88, 89, 90, 91, 92, 93, 94, 95, 96, 97, 98, 99, 100, 101, 102, 103, 104, 105, 106, 107, 108, 109, 110, 111, 112, 113, 114, 115, 116, 117, 577, 579, 581, 583, 585, 587, 589, 591, 593, 595, 597, 599, 601, 603, 605, 607, 609, 611, 613, 615, 617, 619, 621, 623, 625, 627, or 637, a variant, derivative, orthologue, paralogue or homologue thereof, in which: the amino acid at Mutated site 4 is Val, and the amino acid at Mutated site 5 is Asn.

[0897] In another preferred embodiment, the mutated PPO comprises a sequence of SEQ ID NO: 1, 2, 3, 4, 5, 6, 7, 8, 9, 10, 11, 12, 13, 14, 15, 16, 17, 18, 19, 20, 21, 22, 23, 24, 25, 26, 27, 28, 29, 30, 31, 32, 33, 34, 35, 36, 37, 38, 39, 40, 41, 42, 43, 44, 45, 46, 47, 48, 49, 50, 51, 52, 53, 54, 55, 56, 57, 58, 59, 60, 61, 62, 63, 64, 65, 66, 67, 68, 69, 70, 71, 72, 73, 74, 75, 76, 77, 78, 79, 80, 81, 82, 83, 84, 85, 86, 87, 88, 89, 90, 91, 92, 93, 94, 95, 96, 97, 98, 99, 100, 101, 102, 103, 104, 105, 106, 107, 108, 109, 110, 111, 112, 113, 114, 115, 116, 117, 577, 579, 581, 583, 585, 587, 589, 591, 593, 595, 597, 599, 601, 603, 605, 607, 609, 611, 613, 615, 617, 619, 621, 623, 625, 627, or 637, a variant, derivative, orthologue, paralogue or homologue thereof, in which: the amino acid at Mutated site 4 is Val, and the amino acid at Mutated site 5 is Gln.

[0898] In another preferred embodiment, the mutated PPO comprises a sequence of SEQ ID NO: 1, 2, 3, 4, 5, 6, 7, 8, 9, 10, 11, 12, 13, 14, 15, 16, 17, 18, 19, 20, 21, 22, 23, 24, 25, 26, 27, 28, 29, 30, 31, 32, 33, 34, 35, 36, 37, 38, 39, 40, 41, 42, 43, 44, 45, 46, 47, 48, 49, 50, 51, 52, 53, 54, 55, 56, 57, 58, 59, 60, 61, 62, 63, 64, 65, 66, 67, 68, 69, 70, 71, 72, 73, 74, 75, 76, 77, 78, 79, 80, 81, 82, 83, 84, 85, 86, 87, 88, 89, 90, 91, 92, 93, 94, 95, 96, 97, 98, 99, 100, 101, 102, 103, 104, 105, 106, 107, 108, 109, 110, 111, 112, 113, 114, 115, 116, 117, 577, 579, 581, 583, 585, 587, 589, 591, 593, 595, 597, 599, 601, 603, 605, 607, 609, 611, 613, 615, 617, 619, 621, 623, 625, 627, or 637, a variant, derivative, orthologue, paralogue or homologue thereof, in which: the amino acid at Mutated site 4 is Val, and the amino acid at Mutated site 5 is Cys.

[0899] In another preferred embodiment, the mutated PPO comprises a sequence of SEQ ID NO: 1, 2, 3, 4, 5, 6, 7, 8, 9, 10, 11, 12, 13, 14, 15, 16, 17, 18, 19, 20, 21, 22, 23, 24, 25, 26, 27, 28, 29, 30, 31, 32, 33, 34, 35, 36, 37, 38, 39, 40, 41, 42, 43, 44, 45, 46, 47, 48, 49, 50, 51, 52, 53, 54, 55, 56, 57, 58, 59, 60, 61, 62, 63, 64, 65, 66, 67, 68, 69, 70, 71, 72, 73, 74, 75, 76, 77, 78, 79, 80, 81, 82, 83, 84, 85, 86, 87, 88, 89, 90, 91, 92, 93, 94, 95, 96, 97, 98, 99, 100, 101, 102, 103, 104, 105, 106, 107, 108, 109, 110, 111, 112, 113, 114, 115, 116, 117, 577, 579, 581, 583, 585, 587, 589, 591, 593, 595, 597, 599, 601, 603, 605, 607, 609, 611, 613, 615, 617, 619, 621, 623, 625, 627, or 637, a variant, derivative, orthologue, paralogue or homologue thereof, in which: the amino acid at Mutated site 4 is Val, and the amino acid at Mutated site 5 is Gly.

[0900] In another preferred embodiment, the mutated PPO comprises a sequence of SEQ ID NO: 1, 2, 3, 4, 5, 6, 7, 8, 9, 10, 11, 12, 13, 14, 15, 16, 17, 18, 19, 20, 21, 22, 23, 24, 25, 26, 27, 28, 29, 30, 31, 32, 33, 34, 35, 36, 37, 38, 39, 40, 41, 42, 43, 44, 45, 46, 47, 48, 49, 50, 51, 52, 53, 54, 55, 56, 57, 58, 59, 60, 61, 62, 63, 64, 65, 66, 67, 68, 69, 70, 71, 72, 73, 74, 75, 76, 77, 78, 79, 80, 81, 82, 83, 84, 85, 86, 87, 88, 89, 90, 91, 92, 93, 94, 95, 96, 97, 98, 99, 100, 101, 102, 103, 104, 105, 106, 107, 108, 109, 110, 111, 112, 113, 114, 115, 116, 117, 577, 579, 581, 583, 585, 587, 589, 591, 593, 595, 597, 599, 601, 603, 605, 607, 609, 611, 613, 615, 617, 619, 621, 623, 625, 627, or 637, a variant, derivative, orthologue, paralogue or homologue thereof, in which: the amino acid at Mutated site 4 is Val, and the amino acid at Mutated site 5 is Pro.

[0901] In another preferred embodiment, the mutated PPO comprises a sequence of SEQ ID NO: 1, 2, 3, 4, 5, 6, 7, 8, 9, 10, 11, 12, 13, 14, 15, 16, 17, 18, 19, 20, 21, 22, 23, 24, 25, 26, 27, 28, 29, 30, 31, 32, 33, 34, 35, 36, 37, 38, 39, 40, 41, 42, 43, 44, 45, 46, 47, 48, 49, 50, 51, 52, 53, 54, 55, 56, 57, 58, 59, 60, 61, 62, 63, 64, 65, 66, 67, 68, 69, 70, 71, 72, 73, 74, 75, 76, 77, 78, 79, 80, 81, 82, 83, 84, 85, 86, 87, 88, 89, 90, 91, 92, 93, 94, 95, 96, 97, 98, 99, 100, 101, 102, 103, 104, 105, 106, 107, 108, 109, 110, 111, 112, 113, 114, 115, 116, 117, 577, 579, 581, 583, 585, 587, 589, 591, 593, 595, 597, 599, 601, 603, 605, 607, 609, 611, 613, 615, 617, 619, 621, 623, 625, 627, or 637, a variant, derivative, orthologue, paralogue or homologue thereof, in which: the amino acid at Mutated site 4 is Val, and the amino acid at Mutated site 5 is Arg.

[0902] In another preferred embodiment, the mutated PPO comprises a sequence of SEQ ID NO: 1, 2, 3, 4, 5, 6, 7, 8, 9, 10, 11, 12, 13, 14, 15, 16, 17, 18, 19, 20, 21, 22, 23, 24, 25, 26, 27, 28, 29, 30, 31, 32, 33, 34, 35, 36, 37, 38, 39, 40, 41, 42, 43, 44, 45, 46, 47, 48, 49, 50, 51, 52, 53, 54, 55, 56, 57, 58, 59, 60, 61, 62, 63, 64, 65, 66, 67, 68, 69, 70, 71, 72, 73, 74, 75, 76, 77, 78, 79, 80, 81, 82, 83, 84, 85, 86, 87, 88, 89, 90, 91, 92, 93, 94, 95, 96, 97, 98, 99, 100, 101, 102, 103, 104, 105, 106, 107, 108, 109, 110, 111, 112, 113, 114, 115, 116, 117, 577, 579, 581, 583, 585, 587, 589, 591, 593, 595, 597, 599, 601, 603, 605, 607, 609, 611, 613, 615, 617, 619, 621, 623, 625, 627, or 637, a variant, derivative, orthologue, paralogue or homologue thereof, in which: the amino acid at Mutated site 4 is Val, and the amino acid at Mutated site 5 is Tyr.

[0903] In another preferred embodiment, the mutated PPO comprises a sequence of SEQ ID NO: 1, 2, 3, 4, 5, 6, 7, 8, 9, 10, 11, 12, 13, 14, 15, 16, 17, 18, 19, 20, 21, 22, 23, 24, 25, 26, 27, 28, 29, 30, 31, 32, 33, 34, 35, 36, 37, 38, 39, 40, 41, 42, 43, 44, 45, 46, 47, 48, 49, 50, 51, 52, 53, 54, 55, 56, 57, 58, 59, 60, 61, 62, 63, 64, 65, 66, 67, 68, 69, 70, 71, 72, 73, 74, 75, 76, 77, 78, 79, 80, 81, 82, 83, 84, 85, 86, 87, 88, 89, 90, 91, 92, 93, 94, 95, 96, 97, 98, 99, 100, 101, 102, 103, 104, 105, 106, 107, 108, 109, 110, 111, 112, 113, 114, 115, 116, 117, 577, 579, 581, 583, 585, 587, 589, 591, 593, 595, 597, 599, 601,603, 605, 607, 609, 611,613, 615, 617, 619, 621,623, 625, 627, or 637, a variant, derivative, orthologue, paralogue or homologue thereof, in which: the amino acid at Mutated site 4 is Val, and the amino acid at Mutated site 5 is Trp.

[0904] In another preferred embodiment, the mutated PPO comprises a sequence of SEQ ID NO: 1, 2, 3, 4, 5, 6, 7, 8, 9, 10, 11, 12, 13, 14, 15, 16, 17, 18, 19, 20, 21, 22, 23, 24, 25, 26, 27, 28, 29, 30, 31, 32, 33, 34, 35, 36, 37, 38, 39, 40, 41, 42, 43, 44, 45, 46, 47, 48, 49, 50, 51, 52, 53, 54, 55, 56, 57, 58, 59, 60, 61, 62, 63, 64, 65, 66, 67, 68, 69, 70, 71, 72, 73, 74, 75, 76, 77, 78, 79, 80, 81, 82, 83, 84, 85, 86, 87, 88, 89, 90, 91, 92, 93, 94, 95, 96, 97, 98, 99, 100, 101, 102, 103, 104, 105, 106, 107, 108, 109, 110, 111, 112, 113, 114, 115, 116, 117, 577, 579, 581, 583, 585, 587, 589, 591, 593, 595, 597, 599, 601, 603, 605, 607, 609, 611, 613, 615, 617, 619, 621, 623, 625, 627, or 637, a variant, derivative, orthologue, paralogue or homologue thereof, in which: the amino acid at Mutated site 4 is Ile, and the amino acid at Mutated site 5 is Ala.

[0905] In another preferred embodiment, the mutated PPO comprises a sequence of SEQ ID NO: 1, 2, 3, 4, 5, 6, 7, 8, 9, 10, 11, 12, 13, 14, 15, 16, 17, 18, 19, 20, 21, 22, 23, 24, 25, 26, 27, 28, 29, 30, 31, 32, 33, 34, 35, 36, 37, 38, 39, 40, 41, 42, 43, 44, 45, 46, 47, 48, 49, 50, 51, 52, 53, 54, 55, 56, 57, 58, 59, 60, 61, 62, 63, 64, 65, 66, 67, 68, 69, 70, 71, 72, 73, 74, 75, 76, 77, 78, 79, 80, 81, 82, 83, 84, 85, 86, 87, 88, 89, 90, 91, 92, 93, 94, 95, 96, 97, 98, 99, 100, 101, 102, 103, 104, 105, 106, 107, 108, 109, 110, 111, 112, 113, 114, 115, 116, 117, 577, 579, 581, 583, 585, 587, 589, 591, 593, 595, 597, 599, 601, 603, 605, 607, 609, 611, 613, 615, 617, 619, 621, 623, 625, 627, or 637, a variant, derivative, orthologue, paralogue or homologue thereof, in which: the amino acid at Mutated site 4 is Ile, and the amino acid at Mutated site 5 is Leu.

[0906] In another preferred embodiment, the mutated PPO comprises a sequence of SEQ ID NO: 1, 2, 3, 4, 5, 6, 7, 8, 9, 10, 11, 12, 13, 14, 15, 16, 17, 18, 19, 20, 21, 22, 23, 24, 25, 26, 27, 28, 29, 30, 31, 32, 33, 34, 35, 36, 37, 38, 39, 40, 41, 42, 43, 44, 45, 46, 47, 48, 49, 50, 51, 52, 53, 54, 55, 56, 57, 58, 59, 60, 61, 62, 63, 64, 65, 66, 67, 68, 69, 70, 71, 72, 73, 74, 75, 76, 77, 78, 79, 80, 81, 82, 83, 84, 85, 86, 87, 88, 89, 90, 91, 92, 93, 94, 95, 96, 97, 98, 99, 100, 101, 102, 103, 104, 105, 106, 107, 108, 109, 110, 111, 112, 113, 114, 115, 116, 117, 577, 579, 581, 583, 585, 587, 589, 591, 593, 595, 597, 599, 601, 603, 605, 607, 609, 611, 613, 615, 617, 619, 621, 623, 625, 627, or 637, a variant, derivative, orthologue, paralogue or homologue thereof, in which: the amino acid at Mutated site 4 is Ile, and the amino acid at Mutated site 5 is Val.

[0907] In another preferred embodiment, the mutated PPO comprises a sequence of SEQ ID NO: 1, 2, 3, 4, 5, 6, 7, 8, 9, 10, 11, 12, 13, 14, 15, 16, 17, 18, 19, 20, 21, 22, 23, 24, 25, 26, 27, 28, 29, 30, 31, 32, 33, 34, 35, 36, 37, 38, 39, 40, 41, 42, 43, 44, 45, 46, 47, 48, 49, 50, 51, 52, 53, 54, 55, 56, 57, 58, 59, 60, 61, 62, 63, 64, 65, 66, 67, 68, 69, 70, 71, 72, 73, 74, 75, 76, 77, 78, 79, 80, 81, 82, 83, 84, 85, 86, 87, 88, 89, 90, 91, 92, 93, 94, 95, 96, 97, 98, 99, 100, 101, 102, 103, 104, 105, 106, 107, 108, 109, 110, 111, 112, 113, 114, 115, 116, 117, 577, 579, 581, 583, 585, 587, 589, 591, 593, 595, 597, 599, 601, 603, 605, 607, 609, 611, 613, 615, 617, 619, 621, 623, 625, 627, or 637, a variant, derivative, orthologue, paralogue or homologue thereof, in which: the amino acid at Mutated site 4 is Ile, and the amino acid at Mutated site 5 is Ile.

[0908] In another preferred embodiment, the mutated PPO comprises a sequence of SEQ ID NO: 1, 2, 3, 4, 5, 6, 7, 8, 9, 10, 11, 12, 13, 14, 15, 16, 17, 18, 19, 20, 21, 22, 23, 24, 25, 26, 27, 28, 29, 30, 31, 32, 33, 34, 35, 36, 37, 38, 39, 40, 41, 42, 43, 44, 45, 46, 47, 48, 49, 50, 51, 52, 53, 54, 55, 56, 57, 58, 59, 60, 61, 62, 63, 64, 65, 66, 67, 68, 69, 70, 71, 72, 73, 74, 75, 76, 77, 78, 79, 80, 81, 82, 83, 84, 85, 86, 87, 88, 89, 90, 91, 92, 93, 94, 95, 96, 97, 98, 99, 100, 101, 102, 103, 104, 105, 106, 107, 108, 109, 110, 111, 112, 113, 114, 115, 116, 117, 577, 579, 581, 583, 585, 587, 589, 591, 593, 595, 597, 599, 601, 603, 605, 607, 609, 611, 613, 615, 617, 619, 621, 623, 625, 627, or 637, a variant, derivative, orthologue, paralogue or homologue thereof, in which: the amino acid at Mutated site 4 is Ile, and the amino acid at Mutated site 5 is Met.

[0909] In another preferred embodiment, the mutated PPO comprises a sequence of SEQ ID NO: 1, 2, 3, 4, 5, 6, 7, 8, 9, 10, 11, 12, 13, 14, 15, 16, 17, 18, 19, 20, 21, 22, 23, 24, 25, 26, 27, 28, 29, 30, 31, 32, 33, 34, 35, 36, 37, 38, 39, 40, 41, 42, 43, 44, 45, 46, 47, 48, 49, 50, 51, 52, 53, 54, 55, 56, 57, 58, 59, 60, 61, 62, 63, 64, 65, 66, 67, 68, 69, 70, 71, 72, 73, 74, 75, 76, 77, 78, 79, 80, 81, 82, 83, 84, 85, 86, 87, 88, 89, 90, 91, 92, 93, 94, 95, 96, 97, 98, 99, 100, 101, 102, 103, 104, 105, 106, 107, 108, 109, 110, 111, 112, 113, 114, 115, 116, 117, 577, 579, 581, 583, 585, 587, 589, 591, 593, 595, 597, 599, 601, 603, 605, 607, 609, 611, 613, 615, 617, 619, 621, 623, 625, 627, or 637, a variant, derivative, orthologue, paralogue or homologue thereof, in which: the amino acid at Mutated site 4 is Ile, and the amino acid at Mutated site 5 is His.

[0910] In another preferred embodiment, the mutated PPO comprises a sequence of SEQ ID NO: 1, 2, 3, 4, 5, 6, 7, 8, 9, 10, 11, 12, 13, 14, 15, 16, 17, 18, 19, 20, 21, 22, 23, 24, 25, 26, 27, 28, 29, 30, 31, 32, 33, 34, 35, 36, 37, 38, 39, 40, 41, 42, 43, 44, 45, 46, 47, 48, 49, 50, 51, 52, 53, 54, 55, 56, 57, 58, 59, 60, 61, 62, 63, 64, 65, 66, 67, 68, 69, 70, 71, 72, 73, 74, 75, 76, 77, 78, 79, 80, 81, 82, 83, 84, 85, 86, 87, 88, 89, 90, 91, 92, 93, 94, 95, 96, 97, 98, 99, 100, 101, 102, 103, 104, 105, 106, 107, 108, 109, 110, 111, 112, 113, 114, 115, 116, 117, 577, 579, 581, 583, 585, 587, 589, 591, 593, 595, 597, 599, 601, 603, 605, 607, 609, 611, 613, 615, 617, 619, 621, 623, 625, 627, or 637, a variant, derivative, orthologue, paralogue or homologue thereof, in which: the amino acid at Mutated site 4 is Ile, and the amino acid at Mutated site 5 is Lys.

[0911] In another preferred embodiment, the mutated PPO comprises a sequence of SEQ ID NO: 1, 2, 3, 4, 5, 6, 7, 8, 9, 10, 11, 12, 13, 14, 15, 16, 17, 18, 19, 20, 21, 22, 23, 24, 25, 26, 27, 28, 29, 30, 31, 32, 33, 34, 35, 36, 37, 38, 39, 40, 41, 42, 43, 44, 45, 46, 47, 48, 49, 50, 51, 52, 53, 54, 55, 56, 57, 58, 59, 60, 61, 62, 63, 64, 65, 66, 67, 68, 69, 70, 71, 72, 73, 74, 75, 76, 77, 78, 79, 80, 81, 82, 83, 84, 85, 86, 87, 88, 89, 90, 91, 92, 93, 94, 95, 96, 97, 98, 99, 100, 101, 102, 103, 104, 105, 106, 107, 108, 109, 110, 111, 112, 113, 114, 115, 116, 117, 577, 579, 581, 583, 585, 587, 589, 591, 593, 595, 597, 599, 601, 603, 605, 607, 609, 611, 613, 615, 617, 619, 621, 623, 625, 627, or 637, a variant, derivative, orthologue, paralogue or homologue thereof, in which: the amino acid at Mutated site 4 is Ile, and the amino acid at Mutated site 5 is Asp.

[0912] In another preferred embodiment, the mutated PPO comprises a sequence of SEQ ID NO: 1, 2, 3, 4, 5, 6, 7, 8, 9, 10, 11, 12, 13, 14, 15, 16, 17, 18, 19, 20, 21, 22, 23, 24, 25, 26, 27, 28, 29, 30, 31, 32, 33, 34, 35, 36, 37, 38, 39, 40, 41, 42, 43, 44, 45, 46, 47, 48, 49, 50, 51, 52, 53, 54, 55, 56, 57, 58, 59, 60, 61, 62, 63, 64, 65, 66, 67, 68, 69, 70, 71, 72, 73, 74, 75, 76, 77, 78, 79, 80, 81, 82, 83, 84, 85, 86, 87, 88, 89, 90, 91, 92, 93, 94, 95, 96, 97, 98, 99, 100, 101, 102, 103, 104, 105, 106, 107, 108, 109, 110, 111, 112, 113, 114, 115, 116, 117, 577, 579, 581, 583, 585, 587, 589, 591, 593, 595, 597, 599, 601, 603, 605, 607, 609, 611, 613, 615, 617, 619, 621, 623, 625, 627, or 637, a variant, derivative, orthologue, paralogue or homologue thereof, in which: the amino acid at Mutated site 4 is Ile, and the amino acid at Mutated site 5 is Glu.

[0913] In another preferred embodiment, the mutated PPO comprises a sequence of SEQ ID NO: 1, 2, 3, 4, 5, 6, 7, 8, 9, 10, 11, 12, 13, 14, 15, 16, 17, 18, 19, 20, 21, 22, 23, 24, 25, 26, 27, 28, 29, 30, 31, 32, 33, 34, 35, 36, 37, 38, 39, 40, 41, 42, 43, 44, 45, 46, 47, 48, 49, 50, 51, 52, 53, 54, 55, 56, 57, 58, 59, 60, 61, 62, 63, 64, 65, 66, 67, 68, 69, 70, 71, 72, 73, 74, 75, 76, 77, 78, 79, 80, 81, 82, 83, 84, 85, 86, 87, 88, 89, 90, 91, 92, 93, 94, 95, 96, 97, 98, 99, 100, 101, 102, 103, 104, 105, 106, 107, 108, 109, 110, 111, 112, 113, 114, 115, 116, 117, 577, 579, 581, 583, 585, 587, 589, 591, 593, 595, 597, 599, 601, 603, 605, 607, 609, 611, 613, 615, 617, 619, 621, 623, 625, 627, or 637, a variant, derivative, orthologue, paralogue or homologue thereof, in which: the amino acid at Mutated site 4 is Ile, and the amino acid at Mutated site 5 is Ser.

[0914] In another preferred embodiment, the mutated PPO comprises a sequence of SEQ ID NO: 1, 2, 3, 4, 5, 6, 7, 8, 9, 10, 11, 12, 13, 14, 15, 16, 17, 18, 19, 20, 21, 22, 23, 24, 25, 26, 27, 28, 29, 30, 31, 32, 33, 34, 35, 36, 37, 38, 39, 40, 41, 42, 43, 44, 45, 46, 47, 48, 49, 50, 51, 52, 53, 54, 55, 56, 57, 58, 59, 60, 61, 62, 63, 64, 65, 66, 67, 68, 69, 70, 71, 72, 73, 74, 75, 76, 77, 78, 79, 80, 81, 82, 83, 84, 85, 86, 87, 88, 89, 90, 91, 92, 93, 94, 95, 96, 97, 98, 99, 100, 101, 102, 103, 104, 105, 106, 107, 108, 109, 110, 111, 112, 113, 114, 115, 116, 117, 577, 579, 581, 583, 585, 587, 589, 591, 593, 595, 597, 599, 601, 603, 605, 607, 609, 611, 613, 615, 617, 619, 621, 623, 625, 627, or 637, a variant, derivative, orthologue, paralogue or homologue thereof, in which: the amino acid at Mutated site 4 is Ile, and the amino acid at Mutated site 5 is Thr.

[0915] In another preferred embodiment, the mutated PPO comprises a sequence of SEQ ID NO: 1, 2, 3, 4, 5, 6, 7, 8, 9, 10, 11, 12, 13, 14, 15, 16, 17, 18, 19, 20, 21, 22, 23, 24, 25, 26, 27, 28, 29, 30, 31, 32, 33, 34, 35, 36, 37, 38, 39, 40, 41, 42, 43, 44, 45, 46, 47, 48, 49, 50, 51, 52, 53, 54, 55, 56, 57, 58, 59, 60, 61, 62, 63, 64, 65, 66, 67, 68, 69, 70, 71, 72, 73, 74, 75, 76, 77, 78, 79, 80, 81, 82, 83, 84, 85, 86, 87, 88, 89, 90, 91, 92, 93, 94, 95, 96, 97, 98, 99, 100, 101, 102, 103, 104, 105, 106, 107, 108, 109, 110, 111, 112, 113, 114, 115, 116, 117, 577, 579, 581, 583, 585, 587, 589, 591, 593, 595, 597, 599, 601, 603, 605, 607, 609, 611, 613, 615, 617, 619, 621, 623, 625, 627, or 637, a variant, derivative, orthologue, paralogue or homologue thereof, in which: the amino acid at Mutated site 4 is Ile, and the amino acid at Mutated site 5 is Asn.

[0916] In another preferred embodiment, the mutated PPO comprises a sequence of SEQ ID NO: 1, 2, 3, 4, 5, 6, 7, 8, 9, 10, 11, 12, 13, 14, 15, 16, 17, 18, 19, 20, 21, 22, 23, 24, 25, 26, 27, 28, 29, 30, 31, 32, 33, 34, 35, 36, 37, 38, 39, 40, 41, 42, 43, 44, 45, 46, 47, 48, 49, 50, 51, 52, 53, 54, 55, 56, 57, 58, 59, 60, 61, 62, 63, 64, 65, 66, 67, 68, 69, 70, 71, 72, 73, 74, 75, 76, 77, 78, 79, 80, 81, 82, 83, 84, 85, 86, 87, 88, 89, 90, 91, 92, 93, 94, 95, 96, 97, 98, 99, 100, 101, 102, 103, 104, 105, 106, 107, 108, 109, 110, 111, 112, 113, 114, 115, 116, 117, 577, 579, 581, 583, 585, 587, 589, 591, 593, 595, 597, 599, 601, 603, 605, 607, 609, 611, 613, 615, 617, 619, 621, 623, 625, 627, or 637, a variant, derivative, orthologue, paralogue or homologue thereof, in which: the amino acid at Mutated site 4 is Ile, and the amino acid at Mutated site 5 is Gln.

[0917] In another preferred embodiment, the mutated PPO comprises a sequence of SEQ ID NO: 1, 2, 3, 4, 5, 6, 7, 8, 9, 10, 11, 12, 13, 14, 15, 16, 17, 18, 19, 20, 21, 22, 23, 24, 25, 26, 27, 28, 29, 30, 31, 32, 33, 34, 35, 36, 37, 38, 39, 40, 41, 42, 43, 44, 45, 46, 47, 48, 49, 50, 51, 52, 53, 54, 55, 56, 57, 58, 59, 60, 61, 62, 63, 64, 65, 66, 67, 68, 69, 70, 71, 72, 73, 74, 75, 76, 77, 78, 79, 80, 81, 82, 83, 84, 85, 86, 87, 88, 89, 90, 91, 92, 93, 94, 95, 96, 97, 98, 99, 100, 101, 102, 103, 104, 105, 106, 107, 108, 109, 110, 111, 112, 113, 114, 115, 116, 117, 577, 579, 581, 583, 585, 587, 589, 591, 593, 595, 597, 599, 601, 603, 605, 607, 609, 611, 613, 615, 617, 619, 621, 623, 625, 627, or 637, a variant, derivative, orthologue, paralogue or homologue thereof, in which: the amino acid at Mutated site 4 is Ile, and the amino acid at Mutated site 5 is Cys.

[0918] In another preferred embodiment, the mutated PPO comprises a sequence of SEQ ID NO: 1, 2, 3, 4, 5, 6, 7, 8, 9, 10, 11, 12, 13, 14, 15, 16, 17, 18, 19, 20, 21, 22, 23, 24, 25, 26, 27, 28, 29, 30, 31, 32, 33, 34, 35, 36, 37, 38, 39, 40, 41, 42, 43, 44, 45, 46, 47, 48, 49, 50, 51, 52, 53, 54, 55, 56, 57, 58, 59, 60, 61, 62, 63, 64, 65, 66, 67, 68, 69, 70, 71, 72, 73, 74, 75, 76, 77, 78, 79, 80, 81, 82, 83, 84, 85, 86, 87, 88, 89, 90, 91, 92, 93, 94, 95, 96, 97, 98, 99, 100, 101, 102, 103, 104, 105, 106, 107, 108, 109, 110, 111, 112, 113, 114, 115, 116, 117, 577, 579, 581, 583, 585, 587, 589, 591, 593, 595, 597, 599, 601, 603, 605, 607, 609, 611, 613, 615, 617, 619, 621, 623, 625, 627, or 637, a variant, derivative, orthologue, paralogue or homologue thereof, in which: the amino acid at Mutated site 4 is Ile, and the amino acid at Mutated site 5 is Gly.

[0919] In another preferred embodiment, the mutated PPO comprises a sequence of SEQ ID NO: 1, 2, 3, 4, 5, 6, 7, 8, 9, 10, 11, 12, 13, 14, 15, 16, 17, 18, 19, 20, 21, 22, 23, 24, 25, 26, 27, 28, 29, 30, 31, 32, 33, 34, 35, 36, 37, 38, 39, 40, 41, 42, 43, 44, 45, 46, 47, 48, 49, 50, 51, 52, 53, 54, 55, 56, 57, 58, 59, 60, 61, 62, 63, 64, 65, 66, 67, 68, 69, 70, 71, 72, 73, 74, 75, 76, 77, 78, 79, 80, 81, 82, 83, 84, 85, 86, 87, 88, 89, 90, 91, 92, 93, 94, 95, 96, 97, 98, 99, 100, 101, 102, 103, 104, 105, 106, 107, 108, 109, 110, 111, 112, 113, 114, 115, 116, 117, 577, 579, 581, 583, 585, 587, 589, 591, 593, 595, 597, 599, 601, 603, 605, 607, 609, 611, 613, 615, 617, 619, 621, 623, 625, 627, or 637, a variant, derivative, orthologue, paralogue or homologue thereof, in which: the amino acid at Mutated site 4 is Ile, and the amino acid at Mutated site 5 is Pro.

[0920] In another preferred embodiment, the mutated PPO comprises a sequence of SEQ ID NO: 1, 2, 3, 4, 5, 6, 7, 8, 9, 10, 11, 12, 13, 14, 15, 16, 17, 18, 19, 20, 21, 22, 23, 24, 25, 26, 27, 28, 29, 30, 31, 32, 33, 34, 35, 36, 37, 38, 39, 40, 41, 42, 43, 44, 45, 46, 47, 48, 49, 50, 51, 52, 53, 54, 55, 56, 57, 58, 59, 60, 61, 62, 63, 64, 65, 66, 67, 68, 69, 70, 71, 72, 73, 74, 75, 76, 77, 78, 79, 80, 81, 82, 83, 84, 85, 86, 87, 88, 89, 90, 91, 92, 93, 94, 95, 96, 97, 98, 99, 100, 101, 102, 103, 104, 105, 106, 107, 108, 109, 110, 111, 112, 113, 114, 115, 116, 117, 577, 579, 581, 583, 585, 587, 589, 591, 593, 595, 597, 599, 601, 603, 605, 607, 609, 611, 613, 615, 617, 619, 621, 623, 625, 627, or 637, a variant, derivative, orthologue, paralogue or homologue thereof, in which: the amino acid at Mutated site 4 is Ile, and the amino acid at Mutated site 5 is Arg.

[0921] In another preferred embodiment, the mutated PPO comprises a sequence of SEQ ID NO: 1, 2, 3, 4, 5, 6, 7, 8, 9, 10, 11, 12, 13, 14, 15, 16, 17, 18, 19, 20, 21, 22, 23, 24, 25, 26, 27, 28, 29, 30, 31, 32, 33, 34, 35, 36, 37, 38, 39, 40, 41, 42, 43, 44, 45, 46, 47, 48, 49, 50, 51, 52, 53, 54, 55, 56, 57, 58, 59, 60, 61, 62, 63, 64, 65, 66, 67, 68, 69, 70, 71, 72, 73, 74, 75, 76, 77, 78, 79, 80, 81, 82, 83, 84, 85, 86, 87, 88, 89, 90, 91, 92, 93, 94, 95, 96, 97, 98, 99, 100, 101, 102, 103, 104, 105, 106, 107, 108, 109, 110, 111, 112, 113, 114, 115, 116, 117, 577, 579, 581, 583, 585, 587, 589, 591, 593, 595, 597, 599, 601, 603, 605, 607, 609, 611, 613, 615, 617, 619, 621, 623, 625, 627, or 637, a variant, derivative, orthologue, paralogue or homologue thereof, in which: the amino acid at Mutated site 4 is Ile, and the amino acid at Mutated site 5 is Tyr.

[0922] In another preferred embodiment, the mutated PPO comprises a sequence of SEQ ID NO: 1, 2, 3, 4, 5, 6, 7, 8, 9, 10, 11, 12, 13, 14, 15, 16, 17, 18, 19, 20, 21, 22, 23, 24, 25, 26, 27, 28, 29, 30, 31, 32, 33, 34, 35, 36, 37, 38, 39, 40, 41, 42, 43, 44, 45, 46, 47, 48, 49, 50, 51, 52, 53, 54, 55, 56, 57, 58, 59, 60, 61, 62, 63, 64, 65, 66, 67, 68, 69, 70, 71, 72, 73, 74, 75, 76, 77, 78, 79, 80, 81, 82, 83, 84, 85, 86, 87, 88, 89, 90, 91, 92, 93, 94, 95, 96, 97, 98, 99, 100, 101, 102, 103, 104, 105, 106, 107, 108, 109, 110, 111, 112, 113, 114, 115, 116, 117, 577, 579, 581, 583, 585, 587, 589, 591, 593, 595, 597, 599, 601, 603, 605, 607, 609, 611, 613, 615, 617, 619, 621, 623, 625, 627, or 637, a variant, derivative, orthologue, paralogue or homologue thereof, in which: the amino acid at Mutated site 4 is Ile, and the amino acid at Mutated site 5 is Trp.

[0923] In another preferred embodiment, the mutated PPO comprises a sequence of SEQ ID NO: 1, 2, 3, 4, 5, 6, 7, 8, 9, 10, 11, 12, 13, 14, 15, 16, 17, 18, 19, 20, 21, 22, 23, 24, 25, 26, 27, 28, 29, 30, 31, 32, 33, 34, 35, 36, 37, 38, 39, 40, 41, 42, 43, 44, 45, 46, 47, 48, 49, 50, 51, 52, 53, 54, 55, 56, 57, 58, 59, 60, 61, 62, 63, 64, 65, 66, 67, 68, 69, 70, 71, 72, 73, 74, 75, 76, 77, 78, 79, 80, 81, 82, 83, 84, 85, 86, 87, 88, 89, 90, 91, 92, 93, 94, 95, 96, 97, 98, 99, 100, 101, 102, 103, 104, 105, 106, 107, 108, 109, 110, 111, 112, 113, 114, 115, 116, 117, 577, 579, 581, 583, 585, 587, 589, 591, 593, 595, 597, 599, 601, 603, 605, 607, 609, 611, 613, 615, 617, 619, 621, 623, 625, 627, or 637, a variant, derivative, orthologue, paralogue or homologue thereof, in which: the amino acid at Mutated site 4 is Met, and the amino acid at Mutated site 5 is Ala.

[0924] In another preferred embodiment, the mutated PPO comprises a sequence of SEQ ID NO: 1, 2, 3, 4, 5, 6, 7, 8, 9, 10, 11, 12, 13, 14, 15, 16, 17, 18, 19, 20, 21, 22, 23, 24, 25, 26, 27, 28, 29, 30, 31, 32, 33, 34, 35, 36, 37, 38, 39, 40, 41, 42, 43, 44, 45, 46, 47, 48, 49, 50, 51, 52, 53, 54, 55, 56, 57, 58, 59, 60, 61, 62, 63, 64, 65, 66, 67, 68, 69, 70, 71, 72, 73, 74, 75, 76, 77, 78, 79, 80, 81, 82, 83, 84, 85, 86, 87, 88, 89, 90, 91, 92, 93, 94, 95, 96, 97, 98, 99, 100, 101, 102, 103, 104, 105, 106, 107, 108,109, 110, 111, 112, 113, 114, 115, 116, 117, 577, 579, 581, 583, 585, 587, 589, 591, 593, 595, 597, 599, 601, 603, 605, 607, 609, 611, 613, 615, 617, 619, 621, 623, 625, 627, or 637, a variant, derivative, orthologue, paralogue or homologue thereof, in which: the amino acid at Mutated site 4 is Met, and the amino acid at Mutated site 5 is Leu.

[0925] In another preferred embodiment, the mutated PPO comprises a sequence of SEQ ID NO: 1, 2, 3, 4, 5, 6, 7, 8, 9, 10, 11, 12, 13, 14, 15, 16, 17, 18, 19, 20, 21, 22, 23, 24, 25, 26, 27, 28, 29, 30, 31, 32, 33, 34, 35, 36, 37, 38, 39, 40, 41, 42, 43, 44, 45, 46, 47, 48, 49, 50, 51, 52, 53, 54, 55, 56, 57, 58, 59, 60, 61, 62, 63, 64, 65, 66, 67, 68, 69, 70, 71, 72, 73, 74, 75, 76, 77, 78, 79, 80, 81, 82, 83, 84, 85, 86, 87, 88, 89, 90, 91, 92, 93, 94, 95, 96, 97, 98, 99, 100, 101, 102, 103, 104, 105, 106, 107, 108, 109, 110, 111, 112, 113, 114, 115, 116, 117, 577, 579, 581, 583, 585, 587, 589, 591, 593, 595, 597, 599, 601, 603, 605, 607, 609, 611, 613, 615, 617, 619, 621, 623, 625, 627, or 637, a variant, derivative, orthologue, paralogue or homologue thereof, in which: the amino acid at Mutated site 4 is Met, and the amino acid at Mutated site 5 is Val.

[0926] In another preferred embodiment, the mutated PPO comprises a sequence of SEQ ID NO: 1, 2, 3, 4, 5, 6, 7, 8, 9, 10, 11, 12, 13, 14, 15, 16, 17, 18, 19, 20, 21, 22, 23, 24, 25, 26, 27, 28, 29, 30, 31, 32, 33, 34, 35, 36, 37, 38, 39, 40, 41, 42, 43, 44, 45, 46, 47, 48, 49, 50, 51, 52, 53, 54, 55, 56, 57, 58, 59, 60, 61, 62, 63, 64, 65, 66, 67, 68, 69, 70, 71, 72, 73, 74, 75, 76, 77, 78, 79, 80, 81, 82, 83, 84, 85, 86, 87, 88, 89, 90, 91, 92, 93, 94, 95, 96, 97, 98, 99, 100, 101, 102, 103, 104, 105, 106, 107, 108, 109, 110, 111, 112, 113, 114, 115, 116, 117, 577, 579, 581, 583, 585, 587, 589, 591, 593, 595, 597, 599, 601, 603, 605, 607, 609, 611, 613, 615, 617, 619, 621, 623, 625, 627, or 637, a variant, derivative, orthologue, paralogue or homologue thereof, in which: the amino acid at Mutated site 4 is Met, and the amino acid at Mutated site 5 is Ile.

[0927] In another preferred embodiment, the mutated PPO comprises a sequence of SEQ ID NO: 1, 2, 3, 4, 5, 6, 7, 8, 9, 10, 11, 12, 13, 14, 15, 16, 17, 18, 19, 20, 21, 22, 23, 24, 25, 26, 27, 28, 29, 30, 31, 32, 33, 34, 35, 36, 37, 38, 39, 40, 41, 42, 43, 44, 45, 46, 47, 48, 49, 50, 51, 52, 53, 54, 55, 56, 57, 58, 59, 60, 61, 62, 63, 64, 65, 66, 67, 68, 69, 70, 71, 72, 73, 74, 75, 76, 77, 78, 79, 80, 81, 82, 83, 84, 85, 86, 87, 88, 89, 90, 91, 92, 93, 94, 95, 96, 97, 98, 99, 100, 101, 102, 103, 104, 105, 106, 107, 108, 109, 110, 111, 112, 113, 114, 115, 116, 117, 577, 579, 581, 583, 585, 587, 589, 591, 593, 595, 597, 599, 601, 603, 605, 607, 609, 611, 613, 615, 617, 619, 621, 623, 625, 627, or 637, a variant, derivative, orthologue, paralogue or homologue thereof, in which: the amino acid at Mutated site 4 is Met, and the amino acid at Mutated site 5 is Met.

[0928] In another preferred embodiment, the mutated PPO comprises a sequence of SEQ ID NO: 1, 2, 3, 4, 5, 6, 7, 8, 9, 10, 11, 12, 13, 14, 15, 16, 17, 18, 19, 20, 21, 22, 23, 24, 25, 26, 27, 28, 29, 30, 31, 32, 33, 34, 35, 36, 37, 38, 39, 40, 41, 42, 43, 44, 45, 46, 47, 48, 49, 50, 51, 52, 53, 54, 55, 56, 57, 58, 59, 60, 61, 62, 63, 64, 65, 66, 67, 68, 69, 70, 71, 72, 73, 74, 75, 76, 77, 78, 79, 80, 81, 82, 83, 84, 85, 86, 87, 88, 89, 90, 91, 92, 93, 94, 95, 96, 97, 98, 99, 100, 101, 102, 103, 104, 105, 106, 107, 108, 109, 110, 111, 112, 113, 114, 115, 116, 117, 577, 579, 581, 583, 585, 587, 589, 591, 593, 595, 597, 599, 601, 603, 605, 607, 609, 611, 613, 615, 617, 619, 621, 623, 625, 627, or 637, a variant, derivative, orthologue, paralogue or homologue thereof, in which: the amino acid at Mutated site 4 is Met, and the amino acid at Mutated site 5 is His.

[0929] In another preferred embodiment, the mutated PPO comprises a sequence of SEQ ID NO: 1, 2, 3, 4, 5, 6, 7, 8, 9, 10, 11, 12, 13, 14, 15, 16, 17, 18, 19, 20, 21, 22, 23, 24, 25, 26, 27, 28, 29, 30, 31, 32, 33, 34, 35, 36, 37, 38, 39, 40, 41, 42, 43, 44, 45, 46, 47, 48, 49, 50, 51, 52, 53, 54, 55, 56, 57, 58, 59, 60, 61, 62, 63, 64, 65, 66, 67, 68, 69, 70, 71, 72, 73, 74, 75, 76, 77, 78, 79, 80, 81, 82, 83, 84, 85, 86, 87, 88, 89, 90, 91, 92, 93, 94, 95, 96, 97, 98, 99, 100, 101, 102, 103, 104, 105, 106, 107, 108, 109, 110, 111, 112, 113, 114, 115, 116, 117, 577, 579, 581, 583, 585, 587, 589, 591, 593, 595, 597, 599, 601, 603, 605, 607, 609, 611, 613, 615, 617, 619, 621, 623, 625, 627, or 637, a variant, derivative, orthologue, paralogue or homologue thereof, in which: the amino acid at Mutated site 4 is Met, and the amino acid at Mutated site 5 is Lys.

[0930] In another preferred embodiment, the mutated PPO comprises a sequence of SEQ ID NO: 1, 2, 3, 4, 5, 6, 7, 8, 9, 10, 11, 12, 13, 14, 15, 16, 17, 18, 19, 20, 21, 22, 23, 24, 25, 26, 27, 28, 29, 30, 31, 32, 33, 34, 35, 36, 37, 38, 39, 40, 41, 42, 43, 44, 45, 46, 47, 48, 49, 50, 51, 52, 53, 54, 55, 56, 57, 58, 59, 60, 61, 62, 63, 64, 65, 66, 67, 68, 69, 70, 71, 72, 73, 74, 75, 76, 77, 78, 79, 80, 81, 82, 83, 84, 85, 86, 87, 88, 89, 90, 91, 92, 93, 94, 95, 96, 97, 98, 99, 100, 101, 102, 103, 104, 105, 106, 107, 108, 109, 110, 111, 112, 113, 114, 115, 116, 117, 577, 579, 581, 583, 585, 587, 589, 591, 593, 595, 597, 599, 601, 603, 605, 607, 609, 611, 613, 615, 617, 619, 621, 623, 625, 627, or 637, a variant, derivative, orthologue, paralogue or homologue thereof, in which: the amino acid at Mutated site 4 is Met, and the amino acid at Mutated site 5 is Asp.

[0931] In another preferred embodiment, the mutated PPO comprises a sequence of SEQ ID NO: 1, 2, 3, 4, 5, 6, 7, 8, 9, 10, 11, 12, 13, 14, 15, 16, 17, 18, 19, 20, 21, 22, 23, 24, 25, 26, 27, 28, 29, 30, 31, 32, 33, 34, 35, 36, 37, 38, 39, 40, 41, 42, 43, 44, 45, 46, 47, 48, 49, 50, 51, 52, 53, 54, 55, 56, 57, 58, 59, 60, 61, 62, 63, 64, 65, 66, 67, 68, 69, 70, 71, 72, 73, 74, 75, 76, 77, 78, 79, 80, 81, 82, 83, 84, 85, 86, 87, 88, 89, 90, 91, 92, 93, 94, 95, 96, 97, 98, 99, 100, 101, 102, 103, 104, 105, 106, 107, 108, 109, 110, 111, 112, 113, 114, 115, 116, 117, 577, 579, 581, 583, 585, 587, 589, 591, 593, 595, 597, 599, 601, 603, 605, 607, 609, 611, 613, 615, 617, 619, 621, 623, 625, 627, or 637, a variant, derivative, orthologue, paralogue or homologue thereof, in which: the amino acid at Mutated site 4 is Met, and the amino acid at Mutated site 5 is Glu.

[0932] In another preferred embodiment, the mutated PPO comprises a sequence of SEQ ID NO: 1, 2, 3, 4, 5, 6, 7, 8, 9, 10, 11, 12, 13, 14, 15, 16, 17, 18, 19, 20, 21, 22, 23, 24, 25, 26, 27, 28, 29, 30, 31, 32, 33, 34, 35, 36, 37, 38, 39, 40, 41, 42, 43, 44, 45, 46, 47, 48, 49, 50, 51, 52, 53, 54, 55, 56, 57, 58, 59, 60, 61, 62, 63, 64, 65, 66, 67, 68, 69, 70, 71, 72, 73, 74, 75, 76, 77, 78, 79, 80, 81, 82, 83, 84, 85, 86, 87, 88, 89, 90, 91, 92, 93, 94, 95, 96, 97, 98, 99, 100, 101, 102, 103, 104, 105, 106, 107, 108, 109, 110, 111, 112, 113, 114, 115, 116, 117, 577, 579, 581, 583, 585, 587, 589, 591, 593, 595, 597, 599, 601, 603, 605, 607, 609, 611, 613, 615, 617, 619, 621, 623, 625, 627, or 637, a variant, derivative, orthologue, paralogue or homologue thereof, in which: the amino acid at Mutated site 4 is Met, and the amino acid at Mutated site 5 is Ser.

[0933] In another preferred embodiment, the mutated PPO comprises a sequence of SEQ ID NO: 1, 2, 3, 4, 5, 6, 7, 8, 9, 10, 11, 12, 13, 14, 15, 16, 17, 18, 19, 20, 21, 22, 23, 24, 25, 26, 27, 28, 29, 30, 31, 32, 33, 34, 35, 36, 37, 38, 39, 40, 41, 42, 43, 44, 45, 46, 47, 48, 49, 50, 51, 52, 53, 54, 55, 56, 57, 58, 59, 60, 61, 62, 63, 64, 65, 66, 67, 68, 69, 70, 71, 72, 73, 74, 75, 76, 77, 78, 79, 80, 81, 82, 83, 84, 85, 86, 87, 88, 89, 90, 91, 92, 93, 94, 95, 96, 97, 98, 99, 100, 101, 102, 103, 104, 105, 106, 107, 108, 109, 110, 111, 112, 113, 114, 115, 116, 117, 577, 579, 581, 583, 585, 587, 589, 591, 593, 595, 597, 599, 601, 603, 605, 607, 609, 611, 613, 615, 617, 619, 621, 623, 625, 627, or 637, a variant, derivative, orthologue, paralogue or homologue thereof, in which: the amino acid at Mutated site 4 is Met, and the amino acid at Mutated site 5 is Thr.

[0934] In another preferred embodiment, the mutated PPO comprises a sequence of SEQ ID NO: 1, 2, 3, 4, 5, 6, 7, 8, 9, 10, 11, 12, 13, 14, 15, 16, 17, 18, 19, 20, 21, 22, 23, 24, 25, 26, 27, 28, 29, 30, 31, 32, 33, 34, 35, 36, 37, 38, 39, 40, 41, 42, 43, 44, 45, 46, 47, 48, 49, 50, 51, 52, 53, 54, 55, 56, 57, 58, 59, 60, 61, 62, 63, 64, 65, 66, 67, 68, 69, 70, 71, 72, 73, 74, 75, 76, 77, 78, 79, 80, 81, 82, 83, 84, 85, 86, 87, 88, 89, 90, 91, 92, 93, 94, 95, 96, 97, 98, 99, 100, 101, 102, 103, 104, 105, 106, 107, 108, 109, 110, 111, 112, 113, 114, 115, 116, 117, 577, 579, 581, 583, 585, 587, 589, 591, 593, 595, 597, 599, 601, 603, 605, 607, 609, 611, 613, 615, 617, 619, 621, 623, 625, 627, or 637, a variant, derivative, orthologue, paralogue or homologue thereof, in which: the amino acid at Mutated site 4 is Met, and the amino acid at Mutated site 5 is Asn.

[0935] In another preferred embodiment, the mutated PPO comprises a sequence of SEQ ID NO: 1, 2, 3, 4, 5, 6, 7, 8, 9, 10, 11, 12, 13, 14, 15, 16, 17, 18, 19, 20, 21, 22, 23, 24, 25, 26, 27, 28, 29, 30, 31, 32, 33, 34, 35, 36, 37, 38, 39, 40, 41, 42, 43, 44, 45, 46, 47, 48, 49, 50, 51, 52, 53, 54, 55, 56, 57, 58, 59, 60, 61, 62, 63, 64, 65, 66, 67, 68, 69, 70, 71, 72, 73, 74, 75, 76, 77, 78, 79, 80, 81, 82, 83, 84, 85, 86, 87, 88, 89, 90, 91, 92, 93, 94, 95, 96, 97, 98, 99, 100, 101, 102, 103, 104, 105, 106, 107, 108, 109, 110, 111, 112, 113, 114, 115, 116, 117, 577, 579, 581, 583, 585, 587, 589, 591, 593, 595, 597, 599, 601, 603, 605, 607, 609, 611, 613, 615, 617, 619, 621, 623, 625, 627, or 637, a variant, derivative, orthologue, paralogue or homologue thereof, in which: the amino acid at Mutated site 4 is Met, and the amino acid at Mutated site 5 is Gln.

[0936] In another preferred embodiment, the mutated PPO comprises a sequence of SEQ ID NO: 1, 2, 3, 4, 5, 6, 7, 8, 9, 10, 11, 12, 13, 14, 15, 16, 17, 18, 19, 20, 21, 22, 23, 24, 25, 26, 27, 28, 29, 30, 31, 32, 33, 34, 35, 36, 37, 38, 39, 40, 41, 42, 43, 44, 45, 46, 47, 48, 49, 50, 51, 52, 53, 54, 55, 56, 57, 58, 59, 60, 61, 62, 63, 64, 65, 66, 67, 68, 69, 70, 71, 72, 73, 74, 75, 76, 77, 78, 79, 80, 81, 82, 83, 84, 85, 86, 87, 88, 89, 90, 91, 92, 93, 94, 95, 96, 97, 98, 99, 100, 101, 102, 103, 104, 105, 106, 107, 108, 109, 110, 111, 112, 113, 114, 115, 116, 117, 577, 579, 581, 583, 585, 587, 589, 591, 593, 595, 597, 599, 601,603, 605, 607, 609, 611,613, 615, 617, 619, 621,623, 625, 627, or 637, a variant, derivative, orthologue, paralogue or homologue thereof, in which: the amino acid at Mutated site 4 is Met, and the amino acid at Mutated site 5 is Cys.

[0937] In another preferred embodiment, the mutated PPO comprises a sequence of SEQ ID NO: 1, 2, 3, 4, 5, 6, 7, 8, 9, 10, 11, 12, 13, 14, 15, 16, 17, 18, 19, 20, 21, 22, 23, 24, 25, 26, 27, 28, 29, 30, 31, 32, 33, 34, 35, 36, 37, 38, 39, 40, 41, 42, 43, 44, 45, 46, 47, 48, 49, 50, 51, 52, 53, 54, 55, 56, 57, 58, 59, 60, 61, 62, 63, 64, 65, 66, 67, 68, 69, 70, 71, 72, 73, 74, 75, 76, 77, 78, 79, 80, 81, 82, 83, 84, 85, 86, 87, 88, 89, 90, 91, 92, 93, 94, 95, 96, 97, 98, 99, 100, 101, 102, 103, 104, 105, 106, 107, 108, 109, 110, 111, 112, 113, 114, 115, 116, 117, 577, 579, 581, 583, 585, 587, 589, 591, 593, 595, 597, 599, 601, 603, 605, 607, 609, 611, 613, 615, 617, 619, 621, 623, 625, 627, or 637, a variant, derivative, orthologue, paralogue or homologue thereof, in which: the amino acid at Mutated site 4 is Met, and the amino acid at Mutated site 5 is Gly.

[0938] In another preferred embodiment, the mutated PPO comprises a sequence of SEQ ID NO: 1, 2, 3, 4, 5, 6, 7, 8, 9, 10, 11, 12, 13, 14, 15, 16, 17, 18, 19, 20, 21, 22, 23, 24, 25, 26, 27, 28, 29, 30, 31, 32, 33, 34, 35, 36, 37, 38, 39, 40, 41, 42, 43, 44, 45, 46, 47, 48, 49, 50, 51, 52, 53, 54, 55, 56, 57, 58, 59, 60, 61, 62, 63, 64, 65, 66, 67, 68, 69, 70, 71, 72, 73, 74, 75, 76, 77, 78, 79, 80, 81, 82, 83, 84, 85, 86, 87, 88, 89, 90, 91, 92, 93, 94, 95, 96, 97, 98, 99, 100, 101, 102, 103, 104, 105, 106, 107, 108, 109, 110, 111, 112, 113, 114, 115, 116, 117, 577, 579, 581, 583, 585, 587, 589, 591, 593, 595, 597, 599, 601, 603, 605, 607, 609, 611, 613, 615, 617, 619, 621, 623, 625, 627, or 637, a variant, derivative, orthologue, paralogue or homologue thereof, in which: the amino acid at Mutated site 4 is Met, and the amino acid at Mutated site 5 is Pro.

[0939] In another preferred embodiment, the mutated PPO comprises a sequence of SEQ ID NO: 1, 2, 3, 4, 5, 6, 7, 8, 9, 10, 11, 12, 13, 14, 15, 16, 17, 18, 19, 20, 21, 22, 23, 24, 25, 26, 27, 28, 29, 30, 31, 32, 33, 34, 35, 36, 37, 38, 39, 40, 41, 42, 43, 44, 45, 46, 47, 48, 49, 50, 51, 52, 53, 54, 55, 56, 57, 58, 59, 60, 61, 62, 63, 64, 65, 66, 67, 68, 69, 70, 71, 72, 73, 74, 75, 76, 77, 78, 79, 80, 81, 82, 83, 84, 85, 86, 87, 88, 89, 90, 91, 92, 93, 94, 95, 96, 97, 98, 99, 100, 101, 102, 103, 104, 105, 106, 107, 108, 109, 110, 111, 112, 113, 114, 115, 116, 117, 577, 579, 581, 583, 585, 587, 589, 591, 593, 595, 597, 599, 601, 603, 605, 607, 609, 611, 613, 615, 617, 619, 621, 623, 625, 627, or 637, a variant, derivative, orthologue, paralogue or homologue thereof, in which: the amino acid at Mutated site 4 is Met, and the amino acid at Mutated site 5 is Arg.

[0940] In another preferred embodiment, the mutated PPO comprises a sequence of SEQ ID NO: 1, 2, 3, 4, 5, 6, 7, 8, 9, 10, 11, 12, 13, 14, 15, 16, 17, 18, 19, 20, 21, 22, 23, 24, 25, 26, 27, 28, 29, 30, 31, 32, 33, 34, 35, 36, 37, 38, 39, 40, 41, 42, 43, 44, 45, 46, 47, 48, 49, 50, 51, 52, 53, 54, 55, 56, 57, 58, 59, 60, 61, 62, 63, 64, 65, 66, 67, 68, 69, 70, 71, 72, 73, 74, 75, 76, 77, 78, 79, 80, 81, 82, 83, 84, 85, 86, 87, 88, 89, 90, 91, 92, 93, 94, 95, 96, 97, 98, 99, 100, 101, 102, 103, 104, 105, 106, 107, 108, 109, 110, 111, 112, 113, 114, 115, 116, 117, 577, 579, 581, 583, 585, 587, 589, 591, 593, 595, 597, 599, 601, 603, 605, 607, 609, 611, 613, 615, 617, 619, 621, 623, 625, 627, or 637, a variant, derivative, orthologue, paralogue or homologue thereof, in which: the amino acid at Mutated site 4 is Met, and the amino acid at Mutated site 5 is Tyr.

[0941] In another preferred embodiment, the mutated PPO comprises a sequence of SEQ ID NO: 1, 2, 3, 4, 5, 6, 7, 8, 9, 10, 11, 12, 13, 14, 15, 16, 17, 18, 19, 20, 21, 22, 23, 24, 25, 26, 27, 28, 29, 30, 31, 32, 33, 34, 35, 36, 37, 38, 39, 40, 41, 42, 43, 44, 45, 46, 47, 48, 49, 50, 51, 52, 53, 54, 55, 56, 57, 58, 59, 60, 61, 62, 63, 64, 65, 66, 67, 68, 69, 70, 71, 72, 73, 74, 75, 76, 77, 78, 79, 80, 81, 82, 83, 84, 85, 86, 87, 88, 89, 90, 91, 92, 93, 94, 95, 96, 97, 98, 99, 100, 101, 102, 103, 104, 105, 106, 107, 108, 109, 110, 111, 112, 113, 114, 115, 116, 117, 577, 579, 581, 583, 585, 587, 589, 591, 593, 595, 597, 599, 601, 603, 605, 607, 609, 611, 613, 615, 617, 619, 621, 623, 625, 627, or 637, a variant, derivative, orthologue, paralogue or homologue thereof, in which: the amino acid at Mutated site 4 is Met, and the amino acid at Mutated site 5 is Trp.

[0942] In another preferred embodiment, the mutated PPO comprises a sequence of SEQ ID NO: 1, 2, 3, 4, 5, 6, 7, 8, 9, 10, 11, 12, 13, 14, 15, 16, 17, 18, 19, 20, 21, 22, 23, 24, 25, 26, 27, 28, 29, 30, 31, 32, 33, 34, 35, 36, 37, 38, 39, 40, 41, 42, 43, 44, 45, 46, 47, 48, 49, 50, 51, 52, 53, 54, 55, 56, 57, 58, 59, 60, 61, 62, 63, 64, 65, 66, 67, 68, 69, 70, 71, 72, 73, 74, 75, 76, 77, 78, 79, 80, 81, 82, 83, 84, 85, 86, 87, 88, 89, 90, 91, 92, 93, 94, 95, 96, 97, 98, 99, 100, 101, 102, 103, 104, 105, 106, 107, 108, 109, 110, 111, 112, 113, 114, 115, 116, 117, 577, 579, 581, 583, 585, 587, 589, 591, 593, 595, 597, 599, 601, 603, 605, 607, 609, 611, 613, 615, 617, 619, 621, 623, 625, 627, or 637, a variant, derivative, orthologue, paralogue or homologue thereof, in which: the amino acid at Mutated site 4 is His, and the amino acid at Mutated site 5 is Ala.

[0943] In another preferred embodiment, the mutated PPO comprises a sequence of SEQ ID NO: 1, 2, 3, 4, 5, 6, 7, 8, 9, 10, 11, 12, 13, 14, 15, 16, 17, 18, 19, 20, 21, 22, 23, 24, 25, 26, 27, 28, 29, 30, 31, 32, 33, 34, 35, 36, 37, 38, 39, 40, 41, 42, 43, 44, 45, 46, 47, 48, 49, 50, 51, 52, 53, 54, 55, 56, 57, 58, 59, 60, 61, 62, 63, 64, 65, 66, 67, 68, 69, 70, 71, 72, 73, 74, 75, 76, 77, 78, 79, 80, 81, 82, 83, 84, 85, 86, 87, 88, 89, 90, 91, 92, 93, 94, 95, 96, 97, 98, 99, 100, 101, 102, 103, 104, 105, 106, 107, 108, 109, 110, 111, 112, 113, 114, 115, 116, 117, 577, 579, 581, 583, 585, 587, 589, 591, 593, 595, 597, 599, 601, 603, 605, 607, 609, 611, 613, 615, 617, 619, 621, 623, 625, 627, or 637, a variant, derivative, orthologue, paralogue or homologue thereof, in which: the amino acid at Mutated site 4 is His, and the amino acid at Mutated site 5 is Leu.

[0944] In another preferred embodiment, the mutated PPO comprises a sequence of SEQ ID NO: 1, 2, 3, 4, 5, 6, 7, 8, 9, 10, 11, 12, 13, 14, 15, 16, 17, 18, 19, 20, 21, 22, 23, 24, 25, 26, 27, 28, 29, 30, 31, 32, 33, 34, 35, 36, 37, 38, 39, 40, 41, 42, 43, 44, 45, 46, 47, 48, 49, 50, 51, 52, 53, 54, 55, 56, 57, 58, 59, 60, 61, 62, 63, 64, 65, 66, 67, 68, 69, 70, 71, 72, 73, 74, 75, 76, 77, 78, 79, 80, 81, 82, 83, 84, 85, 86, 87, 88, 89, 90, 91, 92, 93, 94, 95, 96, 97, 98, 99, 100, 101, 102, 103, 104, 105, 106, 107, 108, 109, 110, 111, 112, 113, 114, 115, 116, 117, 577, 579, 581, 583, 585, 587, 589, 591, 593, 595, 597, 599, 601, 603, 605, 607, 609, 611, 613, 615, 617, 619, 621, 623, 625, 627, or 637, a variant, derivative, orthologue, paralogue or homologue thereof, in which: the amino acid at Mutated site 4 is His, and the amino acid at Mutated site 5 is Val.

[0945] In another preferred embodiment, the mutated PPO comprises a sequence of SEQ ID NO: 1, 2, 3, 4, 5, 6, 7, 8, 9, 10, 11, 12, 13, 14, 15, 16, 17, 18, 19, 20, 21, 22, 23, 24, 25, 26, 27, 28, 29, 30, 31, 32, 33, 34, 35, 36, 37, 38, 39, 40, 41, 42, 43, 44, 45, 46, 47, 48, 49, 50, 51, 52, 53, 54, 55, 56, 57, 58, 59, 60, 61, 62, 63, 64, 65, 66, 67, 68, 69, 70, 71, 72, 73, 74, 75, 76, 77, 78, 79, 80, 81, 82, 83, 84, 85, 86, 87, 88, 89, 90, 91, 92, 93, 94, 95, 96, 97, 98, 99, 100, 101, 102, 103, 104, 105, 106, 107, 108, 109, 110, 111, 112, 113, 114, 115, 116, 117, 577, 579, 581, 583, 585, 587, 589, 591, 593, 595, 597, 599, 601, 603, 605, 607, 609, 611, 613, 615, 617, 619, 621, 623, 625, 627, or 637, a variant, derivative, orthologue, paralogue or homologue thereof, in which: the amino acid at Mutated site 4 is His, and the amino acid at Mutated site 5 is Ile.

[0946] In another preferred embodiment, the mutated PPO comprises a sequence of SEQ ID NO: 1, 2, 3, 4, 5, 6, 7, 8, 9, 10, 11, 12, 13, 14, 15, 16, 17, 18, 19, 20, 21, 22, 23, 24, 25, 26, 27, 28, 29, 30, 31, 32, 33, 34, 35, 36, 37, 38, 39, 40, 41, 42, 43, 44, 45, 46, 47, 48, 49, 50, 51, 52, 53, 54, 55, 56, 57, 58, 59, 60, 61, 62, 63, 64, 65, 66, 67, 68, 69, 70, 71, 72, 73, 74, 75, 76, 77, 78, 79, 80, 81, 82, 83, 84, 85, 86, 87, 88, 89, 90, 91, 92, 93, 94, 95, 96, 97, 98, 99, 100, 101, 102, 103, 104, 105, 106, 107, 108, 109, 110, 111, 112, 113, 114, 115, 116, 117, 577, 579, 581, 583, 585, 587, 589, 591, 593, 595, 597, 599, 601, 603, 605, 607, 609, 611, 613, 615, 617, 619, 621, 623, 625, 627, or 637, a variant, derivative, orthologue, paralogue or homologue thereof, in which: the amino acid at Mutated site 4 is His, and the amino acid at Mutated site 5 is Met.

[0947] In another preferred embodiment, the mutated PPO comprises a sequence of SEQ ID NO: 1, 2, 3, 4, 5, 6, 7, 8, 9, 10, 11, 12, 13, 14, 15, 16, 17, 18, 19, 20, 21, 22, 23, 24, 25, 26, 27, 28, 29, 30, 31, 32, 33, 34, 35, 36, 37, 38, 39, 40, 41, 42, 43, 44, 45, 46, 47, 48, 49, 50, 51, 52, 53, 54, 55, 56, 57, 58, 59, 60, 61, 62, 63, 64, 65, 66, 67, 68, 69, 70, 71, 72, 73, 74, 75, 76, 77, 78, 79, 80, 81, 82, 83, 84, 85, 86, 87, 88, 89, 90, 91, 92, 93, 94, 95, 96, 97, 98, 99, 100, 101, 102, 103, 104, 105, 106, 107, 108, 109, 110, 111, 112, 113, 114, 115, 116, 117, 577, 579, 581, 583, 585, 587, 589, 591, 593, 595, 597, 599, 601, 603, 605, 607, 609, 611, 613, 615, 617, 619, 621, 623, 625, 627, or 637, a variant, derivative, orthologue, paralogue or homologue thereof, in which: the amino acid at Mutated site 4 is His, and the amino acid at Mutated site 5 is His.

[0948] In another preferred embodiment, the mutated PPO comprises a sequence of SEQ ID NO: 1, 2, 3, 4, 5, 6, 7, 8, 9, 10, 11, 12, 13, 14, 15, 16, 17, 18, 19, 20, 21, 22, 23, 24, 25, 26, 27, 28, 29, 30, 31, 32, 33, 34, 35, 36, 37, 38, 39, 40, 41, 42, 43, 44, 45, 46, 47, 48, 49, 50, 51, 52, 53, 54, 55, 56, 57, 58, 59, 60, 61, 62, 63, 64, 65, 66, 67, 68, 69, 70, 71, 72, 73, 74, 75, 76, 77, 78, 79, 80, 81, 82, 83, 84, 85, 86, 87, 88, 89, 90, 91, 92, 93, 94, 95, 96, 97, 98, 99, 100, 101, 102, 103, 104, 105, 106, 107, 108, 109, 110, 111, 112, 113, 114, 115, 116, 117, 577, 579, 581, 583, 585, 587, 589, 591, 593, 595, 597, 599, 601, 603, 605, 607, 609, 611, 613, 615, 617, 619, 621, 623, 625, 627, or 637, a variant, derivative, orthologue, paralogue or homologue thereof, in which: the amino acid at Mutated site 4 is His, and the amino acid at Mutated site 5 is Lys.

[0949] In another preferred embodiment, the mutated PPO comprises a sequence of SEQ ID NO: 1, 2, 3, 4, 5, 6, 7, 8, 9, 10, 11, 12, 13, 14, 15, 16, 17, 18, 19, 20, 21, 22, 23, 24, 25, 26, 27, 28, 29, 30, 31, 32, 33, 34, 35, 36, 37, 38, 39, 40, 41, 42, 43, 44, 45, 46, 47, 48, 49, 50, 51, 52, 53, 54, 55, 56, 57, 58, 59, 60, 61, 62, 63, 64, 65, 66, 67, 68, 69, 70, 71, 72, 73, 74, 75, 76, 77, 78, 79, 80, 81, 82, 83, 84, 85, 86, 87, 88, 89, 90, 91, 92, 93, 94, 95, 96, 97, 98, 99, 100, 101, 102, 103, 104, 105, 106, 107, 108, 109, 110, 111, 112, 113, 114, 115, 116, 117, 577, 579, 581, 583, 585, 587, 589, 591, 593, 595, 597, 599, 601, 603, 605, 607, 609, 611, 613, 615, 617, 619, 621, 623, 625, 627, or 637, a variant, derivative, orthologue, paralogue or homologue thereof, in which: the amino acid at Mutated site 4 is His, and the amino acid at Mutated site 5 is Asp.

[0950] In another preferred embodiment, the mutated PPO comprises a sequence of SEQ ID NO: 1, 2, 3, 4, 5, 6, 7, 8, 9, 10, 11, 12, 13, 14, 15, 16, 17, 18, 19, 20, 21, 22, 23, 24, 25, 26, 27, 28, 29, 30, 31, 32, 33, 34, 35, 36, 37, 38, 39, 40, 41, 42, 43, 44, 45, 46, 47, 48, 49, 50, 51, 52, 53, 54, 55, 56, 57, 58, 59, 60, 61, 62, 63, 64, 65, 66, 67, 68, 69, 70, 71, 72, 73, 74, 75, 76, 77, 78, 79, 80, 81, 82, 83, 84, 85, 86, 87, 88, 89, 90, 91, 92, 93, 94, 95, 96, 97, 98, 99, 100, 101, 102, 103, 104, 105, 106, 107, 108, 109, 110, 111, 112, 113, 114, 115, 116, 117, 577, 579, 581, 583, 585, 587, 589, 591, 593, 595, 597, 599, 601, 603, 605, 607, 609, 611, 613, 615, 617, 619, 621, 623, 625, 627, or 637, a variant, derivative, orthologue, paralogue or homologue thereof, in which: the amino acid at Mutated site 4 is His, and the amino acid at Mutated site 5 is Glu.

[0951] In another preferred embodiment, the mutated PPO comprises a sequence of SEQ ID NO: 1, 2, 3, 4, 5, 6, 7, 8, 9, 10, 11, 12, 13, 14, 15, 16, 17, 18, 19, 20, 21, 22, 23, 24, 25, 26, 27, 28, 29, 30, 31, 32, 33, 34, 35, 36, 37, 38, 39, 40, 41, 42, 43, 44, 45, 46, 47, 48, 49, 50, 51, 52, 53, 54, 55, 56, 57, 58, 59, 60, 61, 62, 63, 64, 65, 66, 67, 68, 69, 70, 71, 72, 73, 74, 75, 76, 77, 78, 79, 80, 81, 82, 83, 84, 85, 86, 87, 88, 89, 90, 91, 92, 93, 94, 95, 96, 97, 98, 99, 100, 101, 102, 103, 104, 105, 106, 107, 108, 109, 110, 111, 112, 113, 114, 115, 116, 117, 577, 579, 581, 583, 585, 587, 589, 591, 593, 595, 597, 599, 601, 603, 605, 607, 609, 611, 613, 615, 617, 619, 621, 623, 625, 627, or 637, a variant, derivative, orthologue, paralogue or homologue thereof, in which: the amino acid at Mutated site 4 is His, and the amino acid at Mutated site 5 is Ser.

[0952] In another preferred embodiment, the mutated PPO comprises a sequence of SEQ ID NO: 1, 2, 3, 4, 5, 6, 7, 8, 9, 10, 11, 12, 13, 14, 15, 16, 17, 18, 19, 20, 21, 22, 23, 24, 25, 26, 27, 28, 29, 30, 31, 32, 33, 34, 35, 36, 37, 38, 39, 40, 41, 42, 43, 44, 45, 46, 47, 48, 49, 50, 51, 52, 53, 54, 55, 56, 57, 58, 59, 60, 61, 62, 63, 64, 65, 66, 67, 68, 69, 70, 71, 72, 73, 74, 75, 76, 77, 78, 79, 80, 81, 82, 83, 84, 85, 86, 87, 88, 89, 90, 91, 92, 93, 94, 95, 96, 97, 98, 99, 100, 101, 102, 103, 104, 105, 106, 107, 108, 109, 110, 111, 112, 113, 114, 115, 116, 117, 577, 579, 581, 583, 585, 587, 589, 591, 593, 595, 597, 599, 601, 603, 605, 607, 609, 611, 613, 615, 617, 619, 621, 623, 625, 627, or 637, a variant, derivative, orthologue, paralogue or homologue thereof, in which: the amino acid at Mutated site 4 is His, and the amino acid at Mutated site 5 is Thr.

[0953] In another preferred embodiment, the mutated PPO comprises a sequence of SEQ ID NO: 1, 2, 3, 4, 5, 6, 7, 8, 9, 10, 11, 12, 13, 14, 15, 16, 17, 18, 19, 20, 21, 22, 23, 24, 25, 26, 27, 28, 29, 30, 31, 32, 33, 34, 35, 36, 37, 38, 39, 40, 41, 42, 43, 44, 45, 46, 47, 48, 49, 50, 51, 52, 53, 54, 55, 56, 57, 58, 59, 60, 61, 62, 63, 64, 65, 66, 67, 68, 69, 70, 71, 72, 73, 74, 75, 76, 77, 78, 79, 80, 81, 82, 83, 84, 85, 86, 87, 88, 89, 90, 91, 92, 93, 94, 95, 96, 97, 98, 99, 100, 101, 102, 103, 104, 105, 106, 107, 108, 109, 110, 111, 112, 113, 114, 115, 116, 117, 577, 579, 581, 583, 585, 587, 589, 591, 593, 595, 597, 599, 601, 603, 605, 607, 609, 611, 613, 615, 617, 619, 621, 623, 625, 627, or 637, a variant, derivative, orthologue, paralogue or homologue thereof, in which: the amino acid at Mutated site 4 is His, and the amino acid at Mutated site 5 is Asn.

[0954] In another preferred embodiment, the mutated PPO comprises a sequence of SEQ ID NO: 1, 2, 3, 4, 5, 6, 7, 8, 9, 10, 11, 12, 13, 14, 15, 16, 17, 18, 19, 20, 21, 22, 23, 24, 25, 26, 27, 28, 29, 30, 31, 32, 33, 34, 35, 36, 37, 38, 39, 40, 41, 42, 43, 44, 45, 46, 47, 48, 49, 50, 51, 52, 53, 54, 55, 56, 57, 58, 59, 60, 61, 62, 63, 64, 65, 66, 67, 68, 69, 70, 71, 72, 73, 74, 75, 76, 77, 78, 79, 80, 81, 82, 83, 84, 85, 86, 87, 88, 89, 90, 91, 92, 93, 94, 95, 96, 97, 98, 99, 100, 101, 102, 103, 104, 105, 106, 107, 108, 109, 110, 111, 112, 113, 114, 115, 116, 117, 577, 579, 581, 583, 585, 587, 589, 591, 593, 595, 597, 599, 601, 603, 605, 607, 609, 611, 613, 615, 617, 619, 621, 623, 625, 627, or 637, a variant, derivative, orthologue, paralogue or homologue thereof, in which: the amino acid at Mutated site 4 is His, and the amino acid at Mutated site 5 is Gln.

[0955] In another preferred embodiment, the mutated PPO comprises a sequence of SEQ ID NO: 1, 2, 3, 4, 5, 6, 7, 8, 9, 10, 11, 12, 13, 14, 15, 16, 17, 18, 19, 20, 21, 22, 23, 24, 25, 26, 27, 28, 29, 30, 31, 32, 33, 34, 35, 36, 37, 38, 39, 40, 41, 42, 43, 44, 45, 46, 47, 48, 49, 50, 51, 52, 53, 54, 55, 56, 57, 58, 59, 60, 61, 62, 63, 64, 65, 66, 67, 68, 69, 70, 71, 72, 73, 74, 75, 76, 77, 78, 79, 80, 81, 82, 83, 84, 85, 86, 87, 88, 89, 90, 91, 92, 93, 94, 95, 96, 97, 98, 99, 100, 101, 102, 103, 104, 105, 106, 107, 108, 109, 110, 111, 112, 113, 114, 115, 116, 117, 577, 579, 581, 583, 585, 587, 589, 591, 593, 595, 597, 599, 601, 603, 605, 607, 609, 611, 613, 615, 617, 619, 621, 623, 625, 627, or 637, a variant, derivative, orthologue, paralogue or homologue thereof, in which: the amino acid at Mutated site 4 is His, and the amino acid at Mutated site 5 is Cys.

[0956] In another preferred embodiment, the mutated PPO comprises a sequence of SEQ ID NO: 1, 2, 3, 4, 5, 6, 7, 8, 9, 10, 11, 12, 13, 14, 15, 16, 17, 18, 19, 20, 21, 22, 23, 24, 25, 26, 27, 28, 29, 30, 31, 32, 33, 34, 35, 36, 37, 38, 39, 40, 41, 42, 43, 44, 45, 46, 47, 48, 49, 50, 51, 52, 53, 54, 55, 56, 57, 58, 59, 60, 61, 62, 63, 64, 65, 66, 67, 68, 69, 70, 71, 72, 73, 74, 75, 76, 77, 78, 79, 80, 81, 82, 83, 84, 85, 86, 87, 88, 89, 90, 91, 92, 93, 94, 95, 96, 97, 98, 99, 100, 101, 102, 103, 104, 105, 106, 107, 108, 109, 110, 111, 112, 113, 114, 115, 116, 117, 577, 579, 581, 583, 585, 587, 589, 591, 593, 595, 597, 599, 601, 603, 605, 607, 609, 611, 613, 615, 617, 619, 621, 623, 625, 627, or 637, a variant, derivative, orthologue, paralogue or homologue thereof, in which: the amino acid at Mutated site 4 is His, and the amino acid at Mutated site 5 is Gly.

[0957] In another preferred embodiment, the mutated PPO comprises a sequence of SEQ ID NO: 1, 2, 3, 4, 5, 6, 7, 8, 9, 10, 11, 12, 13, 14, 15, 16, 17, 18, 19, 20, 21, 22, 23, 24, 25, 26, 27, 28, 29, 30, 31, 32, 33, 34, 35, 36, 37, 38, 39, 40, 41, 42, 43, 44, 45, 46, 47, 48, 49, 50, 51, 52, 53, 54, 55, 56, 57, 58, 59, 60, 61, 62, 63, 64, 65, 66, 67, 68, 69, 70, 71, 72, 73, 74, 75, 76, 77, 78, 79, 80, 81, 82, 83, 84, 85, 86, 87, 88, 89, 90, 91, 92, 93, 94, 95, 96, 97, 98, 99, 100, 101, 102, 103, 104, 105, 106, 107, 108, 109, 110, 111, 112, 113, 114, 115, 116, 117, 577, 579, 581, 583, 585, 587, 589, 591, 593, 595, 597, 599, 601, 603, 605, 607, 609, 611, 613, 615, 617, 619, 621, 623, 625, 627, or 637, a variant, derivative, orthologue, paralogue or homologue thereof, in which: the amino acid at Mutated site 4 is His, and the amino acid at Mutated site 5 is Pro.

[0958] In another preferred embodiment, the mutated PPO comprises a sequence of SEQ ID NO: 1, 2, 3, 4, 5, 6, 7, 8, 9, 10, 11, 12, 13, 14, 15, 16, 17, 18, 19, 20, 21, 22, 23, 24, 25, 26, 27, 28, 29, 30, 31, 32, 33, 34, 35, 36, 37, 38, 39, 40, 41, 42, 43, 44, 45, 46, 47, 48, 49, 50, 51, 52, 53, 54, 55, 56, 57, 58, 59, 60, 61, 62, 63, 64, 65, 66, 67, 68, 69, 70, 71, 72, 73, 74, 75, 76, 77, 78, 79, 80, 81, 82, 83, 84, 85, 86, 87, 88, 89, 90, 91, 92, 93, 94, 95, 96, 97, 98, 99, 100, 101, 102, 103, 104, 105, 106, 107, 108, 109, 110, 111, 112, 113, 114, 115, 116, 117, 577, 579, 581, 583, 585, 587, 589, 591, 593, 595, 597, 599, 601, 603, 605, 607, 609, 611, 613, 615, 617, 619, 621, 623, 625, 627, or 637, a variant, derivative, orthologue, paralogue or homologue thereof, in which: the amino acid at Mutated site 4 is His, and the amino acid at Mutated site 5 is Arg.

[0959] In another preferred embodiment, the mutated PPO comprises a sequence of SEQ ID NO: 1, 2, 3, 4, 5, 6, 7, 8, 9, 10, 11, 12, 13, 14, 15, 16, 17, 18, 19, 20, 21, 22, 23, 24, 25, 26, 27, 28, 29, 30, 31, 32, 33, 34, 35, 36, 37, 38, 39, 40, 41, 42, 43, 44, 45, 46, 47, 48, 49, 50, 51, 52, 53, 54, 55, 56, 57, 58, 59, 60, 61, 62, 63, 64, 65, 66, 67, 68, 69, 70, 71, 72, 73, 74, 75, 76, 77, 78, 79, 80, 81, 82, 83, 84, 85, 86, 87, 88, 89, 90, 91, 92, 93, 94, 95, 96, 97, 98, 99, 100, 101, 102, 103, 104, 105, 106, 107, 108, 109, 110, 111, 112, 113, 114, 115, 116, 117, 577, 579, 581, 583, 585, 587, 589, 591, 593, 595, 597, 599, 601,603, 605, 607, 609, 611,613, 615, 617, 619, 621,623, 625, 627, or 637, a variant, derivative, orthologue, paralogue or homologue thereof, in which: the amino acid at Mutated site 4 is His, and the amino acid at Mutated site 5 is Tyr.

[0960] In another preferred embodiment, the mutated PPO comprises a sequence of SEQ ID NO: 1, 2, 3, 4, 5, 6, 7, 8, 9, 10, 11, 12, 13, 14, 15, 16, 17, 18, 19, 20, 21, 22, 23, 24, 25, 26, 27, 28, 29, 30, 31, 32, 33, 34, 35, 36, 37, 38, 39, 40, 41, 42, 43, 44, 45, 46, 47, 48, 49, 50, 51, 52, 53, 54, 55, 56, 57, 58, 59, 60, 61, 62, 63, 64, 65, 66, 67, 68, 69, 70, 71, 72, 73, 74, 75, 76, 77, 78, 79, 80, 81, 82, 83, 84, 85, 86, 87, 88, 89, 90, 91, 92, 93, 94, 95, 96, 97, 98, 99, 100, 101, 102, 103, 104, 105, 106, 107, 108, 109, 110, 111, 112, 113, 114, 115, 116, 117, 577, 579, 581, 583, 585, 587, 589, 591, 593, 595, 597, 599, 601, 603, 605, 607, 609, 611, 613, 615, 617, 619, 621, 623, 625, 627, or 637, a variant, derivative, orthologue, paralogue or homologue thereof, in which: the amino acid at Mutated site 4 is His, and the amino acid at Mutated site 5 is Trp.

[0961] In another preferred embodiment, the mutated PPO comprises a sequence of SEQ ID NO: 1, 2, 3, 4, 5, 6, 7, 8, 9, 10, 11, 12, 13, 14, 15, 16, 17, 18, 19, 20, 21, 22, 23, 24, 25, 26, 27, 28, 29, 30, 31, 32, 33, 34, 35, 36, 37, 38, 39, 40, 41, 42, 43, 44, 45, 46, 47, 48, 49, 50, 51, 52, 53, 54, 55, 56, 57, 58, 59, 60, 61, 62, 63, 64, 65, 66, 67, 68, 69, 70, 71, 72, 73, 74, 75, 76, 77, 78, 79, 80, 81, 82, 83, 84, 85, 86, 87, 88, 89, 90, 91, 92, 93, 94, 95, 96, 97, 98, 99, 100, 101, 102, 103, 104, 105, 106, 107, 108, 109, 110, 111, 112, 113, 114, 115, 116, 117, 577, 579, 581, 583, 585, 587, 589, 591, 593, 595, 597, 599, 601, 603, 605, 607, 609, 611, 613, 615, 617, 619, 621, 623, 625, 627, or 637, a variant, derivative, orthologue, paralogue or homologue thereof, in which: the amino acid at Mutated site 4 is Lys, and the amino acid at Mutated site 5 is Ala.

[0962] In another preferred embodiment, the mutated PPO comprises a sequence of SEQ ID NO: 1, 2, 3, 4, 5, 6, 7, 8, 9, 10, 11, 12, 13, 14, 15, 16, 17, 18, 19, 20, 21, 22, 23, 24, 25, 26, 27, 28, 29, 30, 31, 32, 33, 34, 35, 36, 37, 38, 39, 40, 41, 42, 43, 44, 45, 46, 47, 48, 49, 50, 51, 52, 53, 54, 55, 56, 57, 58, 59, 60, 61, 62, 63, 64, 65, 66, 67, 68, 69, 70, 71, 72, 73, 74, 75, 76, 77, 78, 79, 80, 81, 82, 83, 84, 85, 86, 87, 88, 89, 90, 91, 92, 93, 94, 95, 96, 97, 98, 99, 100, 101, 102, 103, 104, 105, 106, 107, 108, 109, 110, 111, 112, 113, 114, 115, 116, 117, 577, 579, 581, 583, 585, 587, 589, 591, 593, 595, 597, 599, 601, 603, 605, 607, 609, 611, 613, 615, 617, 619, 621, 623, 625, 627, or 637, a variant, derivative, orthologue, paralogue or homologue thereof, in which: the amino acid at Mutated site 4 is Lys, and the amino acid at Mutated site 5 is Leu.

[0963] In another preferred embodiment, the mutated PPO comprises a sequence of SEQ ID NO: 1, 2, 3, 4, 5, 6, 7, 8, 9, 10, 11, 12, 13, 14, 15, 16, 17, 18, 19, 20, 21, 22, 23, 24, 25, 26, 27, 28, 29, 30, 31, 32, 33, 34, 35, 36, 37, 38, 39, 40, 41, 42, 43, 44, 45, 46, 47, 48, 49, 50, 51, 52, 53, 54, 55, 56, 57, 58, 59, 60, 61, 62, 63, 64, 65, 66, 67, 68, 69, 70, 71, 72, 73, 74, 75, 76, 77, 78, 79, 80, 81, 82, 83, 84, 85, 86, 87, 88, 89, 90, 91, 92, 93, 94, 95, 96, 97, 98, 99, 100, 101, 102, 103, 104, 105, 106, 107, 108, 109, 110, 111, 112, 113, 114, 115, 116, 117, 577, 579, 581, 583, 585, 587, 589, 591, 593, 595, 597, 599, 601,603, 605, 607, 609, 611,613, 615, 617, 619, 621,623, 625, 627, or 637, a variant, derivative, orthologue, paralogue or homologue thereof, in which: the amino acid at Mutated site 4 is Lys, and the amino acid at Mutated site 5 is Val.

[0964] In another preferred embodiment, the mutated PPO comprises a sequence of SEQ ID NO: 1, 2, 3, 4, 5, 6, 7, 8, 9, 10, 11, 12, 13, 14, 15, 16, 17, 18, 19, 20, 21, 22, 23, 24, 25, 26, 27, 28, 29, 30, 31, 32, 33, 34, 35, 36, 37, 38, 39, 40, 41, 42, 43, 44, 45, 46, 47, 48, 49, 50, 51, 52, 53, 54, 55, 56, 57, 58, 59, 60, 61, 62, 63, 64, 65, 66, 67, 68, 69, 70, 71, 72, 73, 74, 75, 76, 77, 78, 79, 80, 81, 82, 83, 84, 85, 86, 87, 88, 89, 90, 91, 92, 93, 94, 95, 96, 97, 98, 99, 100, 101, 102, 103, 104, 105, 106, 107, 108, 109, 110, 111, 112, 113, 114, 115, 116, 117, 577, 579, 581, 583, 585, 587, 589, 591, 593, 595, 597, 599, 601, 603, 605, 607, 609, 611, 613, 615, 617, 619, 621, 623, 625, 627, or 637, a variant, derivative, orthologue, paralogue or homologue thereof, in which: the amino acid at Mutated site 4 is Lys, and the amino acid at Mutated site 5 is Ile.

[0965] In another preferred embodiment, the mutated PPO comprises a sequence of SEQ ID NO: 1, 2, 3, 4, 5, 6, 7, 8, 9, 10, 11, 12, 13, 14, 15, 16, 17, 18, 19, 20, 21, 22, 23, 24, 25, 26, 27, 28, 29, 30, 31, 32, 33, 34, 35, 36, 37, 38, 39, 40, 41, 42, 43, 44, 45, 46, 47, 48, 49, 50, 51, 52, 53, 54, 55, 56, 57, 58, 59, 60, 61, 62, 63, 64, 65, 66, 67, 68, 69, 70, 71, 72, 73, 74, 75, 76, 77, 78, 79, 80, 81, 82, 83, 84, 85, 86, 87, 88, 89, 90, 91, 92, 93, 94, 95, 96, 97, 98, 99, 100, 101, 102, 103, 104, 105, 106, 107, 108, 109, 110, 111, 112, 113, 114, 115, 116, 117, 577, 579, 581, 583, 585, 587, 589, 591, 593, 595, 597, 599, 601, 603, 605, 607, 609, 611, 613, 615, 617, 619, 621, 623, 625, 627, or 637, a variant, derivative, orthologue, paralogue or homologue thereof, in which: the amino acid at Mutated site 4 is Lys, and the amino acid at Mutated site 5 is Met.

[0966] In another preferred embodiment, the mutated PPO comprises a sequence of SEQ ID NO: 1, 2, 3, 4, 5, 6, 7, 8, 9, 10, 11, 12, 13, 14, 15, 16, 17, 18, 19, 20, 21, 22, 23, 24, 25, 26, 27, 28, 29, 30, 31, 32, 33, 34, 35, 36, 37, 38, 39, 40, 41, 42, 43, 44, 45, 46, 47, 48, 49, 50, 51, 52, 53, 54, 55, 56, 57, 58, 59, 60, 61, 62, 63, 64, 65, 66, 67, 68, 69, 70, 71, 72, 73, 74, 75, 76, 77, 78, 79, 80, 81, 82, 83, 84, 85, 86, 87, 88, 89, 90, 91, 92, 93, 94, 95, 96, 97, 98, 99, 100, 101, 102, 103, 104, 105, 106, 107, 108, 109, 110, 111, 112, 113, 114, 115, 116, 117, 577, 579, 581, 583, 585, 587, 589, 591, 593, 595, 597, 599, 601, 603, 605, 607, 609, 611, 613, 615, 617, 619, 621, 623, 625, 627, or 637, a variant, derivative, orthologue, paralogue or homologue thereof, in which: the amino acid at Mutated site 4 is Lys, and the amino acid at Mutated site 5 is His.

[0967] In another preferred embodiment, the mutated PPO comprises a sequence of SEQ ID NO: 1, 2, 3, 4, 5, 6, 7, 8, 9, 10, 11, 12, 13, 14, 15, 16, 17, 18, 19, 20, 21, 22, 23, 24, 25, 26, 27, 28, 29, 30, 31, 32, 33, 34, 35, 36, 37, 38, 39, 40, 41, 42, 43, 44, 45, 46, 47, 48, 49, 50, 51, 52, 53, 54, 55, 56, 57, 58, 59, 60, 61, 62, 63, 64, 65, 66, 67, 68, 69, 70, 71, 72, 73, 74, 75, 76, 77, 78, 79, 80, 81, 82, 83, 84, 85, 86, 87, 88, 89, 90, 91, 92, 93, 94, 95, 96, 97, 98, 99, 100, 101, 102, 103, 104, 105, 106, 107, 108, 109, 110, 111, 112, 113, 114, 115, 116, 117, 577, 579, 581, 583, 585, 587, 589, 591, 593, 595, 597, 599, 601, 603, 605, 607, 609, 611, 613, 615, 617, 619, 621, 623, 625, 627, or 637, a variant, derivative, orthologue, paralogue or homologue thereof, in which: the amino acid at Mutated site 4 is Lys, and the amino acid at Mutated site 5 is Lys.

[0968] In another preferred embodiment, the mutated PPO comprises a sequence of SEQ ID NO: 1, 2, 3, 4, 5, 6, 7, 8, 9, 10, 11, 12, 13, 14, 15, 16, 17, 18, 19, 20, 21, 22, 23, 24, 25, 26, 27, 28, 29, 30, 31, 32, 33, 34, 35, 36, 37, 38, 39, 40, 41, 42, 43, 44, 45, 46, 47, 48, 49, 50, 51, 52, 53, 54, 55, 56, 57, 58, 59, 60, 61, 62, 63, 64, 65, 66, 67, 68, 69, 70, 71, 72, 73, 74, 75, 76, 77, 78, 79, 80, 81, 82, 83, 84, 85, 86, 87, 88, 89, 90, 91, 92, 93, 94, 95, 96, 97, 98, 99, 100, 101, 102, 103, 104, 105, 106, 107, 108, 109, 110, 111, 112, 113, 114, 115, 116, 117, 577, 579, 581, 583, 585, 587, 589, 591, 593, 595, 597, 599, 601, 603, 605, 607, 609, 611, 613, 615, 617, 619, 621, 623, 625, 627, or 637, a variant, derivative, orthologue, paralogue or homologue thereof, in which: the amino acid at Mutated site 4 is Lys, and the amino acid at Mutated site 5 is Asp.

[0969] In another preferred embodiment, the mutated PPO comprises a sequence of SEQ ID NO: 1, 2, 3, 4, 5, 6, 7, 8, 9, 10, 11, 12, 13, 14, 15, 16, 17, 18, 19, 20, 21, 22, 23, 24, 25, 26, 27, 28, 29, 30, 31, 32, 33, 34, 35, 36, 37, 38, 39, 40, 41, 42, 43, 44, 45, 46, 47, 48, 49, 50, 51, 52, 53, 54, 55, 56, 57, 58, 59, 60, 61, 62, 63, 64, 65, 66, 67, 68, 69, 70, 71, 72, 73, 74, 75, 76, 77, 78, 79, 80, 81, 82, 83, 84, 85, 86, 87, 88, 89, 90, 91, 92, 93, 94, 95, 96, 97, 98, 99, 100, 101, 102, 103, 104, 105, 106, 107, 108, 109, 110, 111, 112, 113, 114, 115, 116, 117, 577, 579, 581, 583, 585, 587, 589, 591, 593, 595, 597, 599, 601, 603, 605, 607, 609, 611, 613, 615, 617, 619, 621, 623, 625, 627, or 637, a variant, derivative, orthologue, paralogue or homologue thereof, in which: the amino acid at Mutated site 4 is Lys, and the amino acid at Mutated site 5 is Glu.

[0970] In another preferred embodiment, the mutated PPO comprises a sequence of SEQ ID NO: 1, 2, 3, 4, 5, 6, 7, 8, 9, 10, 11, 12, 13, 14, 15, 16, 17, 18, 19, 20, 21, 22, 23, 24, 25, 26, 27, 28, 29, 30, 31, 32, 33, 34, 35, 36, 37, 38, 39, 40, 41, 42, 43, 44, 45, 46, 47, 48, 49, 50, 51, 52, 53, 54, 55, 56, 57, 58, 59, 60, 61, 62, 63, 64, 65, 66, 67, 68, 69, 70, 71, 72, 73, 74, 75, 76, 77, 78, 79, 80, 81, 82, 83, 84, 85, 86, 87, 88, 89, 90, 91, 92, 93, 94, 95, 96, 97, 98, 99, 100, 101, 102, 103, 104, 105, 106, 107, 108, 109, 110, 111, 112, 113, 114, 115, 116, 117, 577, 579, 581, 583, 585, 587, 589, 591, 593, 595, 597, 599, 601, 603, 605, 607, 609, 611, 613, 615, 617, 619, 621, 623, 625, 627, or 637, a variant, derivative, orthologue, paralogue or homologue thereof, in which: the amino acid at Mutated site 4 is Lys, and the amino acid at Mutated site 5 is Ser.

[0971] In another preferred embodiment, the mutated PPO comprises a sequence of SEQ ID NO: 1, 2, 3, 4, 5, 6, 7, 8, 9, 10, 11, 12, 13, 14, 15, 16, 17, 18, 19, 20, 21, 22, 23, 24, 25, 26, 27, 28, 29, 30, 31, 32, 33, 34, 35, 36, 37, 38, 39, 40, 41, 42, 43, 44, 45, 46, 47, 48, 49, 50, 51, 52, 53, 54, 55, 56, 57, 58, 59, 60, 61, 62, 63, 64, 65, 66, 67, 68, 69, 70, 71, 72, 73, 74, 75, 76, 77, 78, 79, 80, 81, 82, 83, 84, 85, 86, 87, 88, 89, 90, 91, 92, 93, 94, 95, 96, 97, 98, 99, 100, 101, 102, 103, 104, 105, 106, 107, 108, 109, 110, 111, 112, 113, 114, 115, 116, 117, 577, 579, 581, 583, 585, 587, 589, 591, 593, 595, 597, 599, 601, 603, 605, 607, 609, 611, 613, 615, 617, 619, 621, 623, 625, 627, or 637, a variant, derivative, orthologue, paralogue or homologue thereof, in which: the amino acid at Mutated site 4 is Lys, and the amino acid at Mutated site 5 is Thr.

[0972] In another preferred embodiment, the mutated PPO comprises a sequence of SEQ ID NO: 1, 2, 3, 4, 5, 6, 7, 8, 9, 10, 11, 12, 13, 14, 15, 16, 17, 18, 19, 20, 21, 22, 23, 24, 25, 26, 27, 28, 29, 30, 31, 32, 33, 34, 35, 36, 37, 38, 39, 40, 41, 42, 43, 44, 45, 46, 47, 48, 49, 50, 51, 52, 53, 54, 55, 56, 57, 58, 59, 60, 61, 62, 63, 64, 65, 66, 67, 68, 69, 70, 71, 72, 73, 74, 75, 76, 77, 78, 79, 80, 81, 82, 83, 84, 85, 86, 87, 88, 89, 90, 91, 92, 93, 94, 95, 96, 97, 98, 99, 100, 101, 102, 103, 104, 105, 106, 107, 108, 109, 110, 111, 112, 113, 114, 115, 116, 117, 577, 579, 581, 583, 585, 587, 589, 591, 593, 595, 597, 599, 601, 603, 605, 607, 609, 611, 613, 615, 617, 619, 621, 623, 625, 627, or 637, a variant, derivative, orthologue, paralogue or homologue thereof, in which: the amino acid at Mutated site 4 is Lys, and the amino acid at Mutated site 5 is Asn.

[0973] In another preferred embodiment, the mutated PPO comprises a sequence of SEQ ID NO: 1, 2, 3, 4, 5, 6, 7, 8, 9, 10, 11, 12, 13, 14, 15, 16, 17, 18, 19, 20, 21, 22, 23, 24, 25, 26, 27, 28, 29, 30, 31, 32, 33, 34, 35, 36, 37, 38, 39, 40, 41, 42, 43, 44, 45, 46, 47, 48, 49, 50, 51, 52, 53, 54, 55, 56, 57, 58, 59, 60, 61, 62, 63, 64, 65, 66, 67, 68, 69, 70, 71, 72, 73, 74, 75, 76, 77, 78, 79, 80, 81, 82, 83, 84, 85, 86, 87, 88, 89, 90, 91, 92, 93, 94, 95, 96, 97, 98, 99, 100, 101, 102, 103, 104, 105, 106, 107, 108, 109, 110, 111, 112, 113, 114, 115, 116, 117, 577, 579, 581, 583, 585, 587, 589, 591, 593, 595, 597, 599, 601, 603, 605, 607, 609, 611, 613, 615, 617, 619, 621, 623, 625, 627, or 637, a variant, derivative, orthologue, paralogue or homologue thereof, in which: the amino acid at Mutated site 4 is Lys, and the amino acid at Mutated site 5 is Gln.

[0974] In another preferred embodiment, the mutated PPO comprises a sequence of SEQ ID NO: 1, 2, 3, 4, 5, 6, 7, 8, 9, 10, 11, 12, 13, 14, 15, 16, 17, 18, 19, 20, 21, 22, 23, 24, 25, 26, 27, 28, 29, 30, 31, 32, 33, 34, 35, 36, 37, 38, 39, 40, 41, 42, 43, 44, 45, 46, 47, 48, 49, 50, 51, 52, 53, 54, 55, 56, 57, 58, 59, 60, 61, 62, 63, 64, 65, 66, 67, 68, 69, 70, 71, 72, 73, 74, 75, 76, 77, 78, 79, 80, 81, 82, 83, 84, 85, 86, 87, 88, 89, 90, 91, 92, 93, 94, 95, 96, 97, 98, 99, 100, 101, 102, 103, 104, 105, 106, 107, 108, 109, 110, 111, 112, 113, 114, 115, 116, 117, 577, 579, 581, 583, 585, 587, 589, 591, 593, 595, 597, 599, 601, 603, 605, 607, 609, 611, 613, 615, 617, 619, 621, 623, 625, 627, or 637, a variant, derivative, orthologue, paralogue or homologue thereof, in which: the amino acid at Mutated site 4 is Lys, and the amino acid at Mutated site 5 is Cys.

[0975] In another preferred embodiment, the mutated PPO comprises a sequence of SEQ ID NO: 1, 2, 3, 4, 5, 6, 7, 8, 9, 10, 11, 12, 13, 14, 15, 16, 17, 18, 19, 20, 21, 22, 23, 24, 25, 26, 27, 28, 29, 30, 31, 32, 33, 34, 35, 36, 37, 38, 39, 40, 41, 42, 43, 44, 45, 46, 47, 48, 49, 50, 51, 52, 53, 54, 55, 56, 57, 58, 59, 60, 61, 62, 63, 64, 65, 66, 67, 68, 69, 70, 71, 72, 73, 74, 75, 76, 77, 78, 79, 80, 81, 82, 83, 84, 85, 86, 87, 88, 89, 90, 91, 92, 93, 94, 95, 96, 97, 98, 99, 100, 101, 102, 103, 104, 105, 106, 107, 108, 109, 110, 111, 112, 113, 114, 115, 116, 117, 577, 579, 581, 583, 585, 587, 589, 591, 593, 595, 597, 599, 601, 603, 605, 607, 609, 611, 613, 615, 617, 619, 621, 623, 625, 627, or 637, a variant, derivative, orthologue, paralogue or homologue thereof, in which: the amino acid at Mutated site 4 is Lys, and the amino acid at Mutated site 5 is Gly.

[0976] In another preferred embodiment, the mutated PPO comprises a sequence of SEQ ID NO: 1, 2, 3, 4, 5, 6, 7, 8, 9, 10, 11, 12, 13, 14, 15, 16, 17, 18, 19, 20, 21, 22, 23, 24, 25, 26, 27, 28, 29, 30, 31, 32, 33, 34, 35, 36, 37, 38, 39, 40, 41, 42, 43, 44, 45, 46, 47, 48, 49, 50, 51, 52, 53, 54, 55, 56, 57, 58, 59, 60, 61, 62, 63, 64, 65, 66, 67, 68, 69, 70, 71, 72, 73, 74, 75, 76, 77, 78, 79, 80, 81, 82, 83, 84, 85, 86, 87, 88, 89, 90, 91, 92, 93, 94, 95, 96, 97, 98, 99, 100, 101, 102, 103, 104, 105, 106, 107, 108, 109, 110, 111, 112, 113, 114, 115, 116, 117, 577, 579, 581, 583, 585, 587, 589, 591, 593, 595, 597, 599, 601, 603, 605, 607, 609, 611, 613, 615, 617, 619, 621, 623, 625, 627, or 637, a variant, derivative, orthologue, paralogue or homologue thereof, in which: the amino acid at Mutated site 4 is Lys, and the amino acid at Mutated site 5 is Pro.

[0977] In another preferred embodiment, the mutated PPO comprises a sequence of SEQ ID NO: 1, 2, 3, 4, 5, 6, 7, 8, 9, 10, 11, 12, 13, 14, 15, 16, 17, 18, 19, 20, 21, 22, 23, 24, 25, 26, 27, 28, 29, 30, 31, 32, 33, 34, 35, 36, 37, 38, 39, 40, 41, 42, 43, 44, 45, 46, 47, 48, 49, 50, 51, 52, 53, 54, 55, 56, 57, 58, 59, 60, 61, 62, 63, 64, 65, 66, 67, 68, 69, 70, 71, 72, 73, 74, 75, 76, 77, 78, 79, 80, 81, 82, 83, 84, 85, 86, 87, 88, 89, 90, 91, 92, 93, 94, 95, 96, 97, 98, 99, 100, 101, 102, 103, 104, 105, 106, 107, 108, 109, 110, 111, 112, 113, 114, 115, 116, 117, 577, 579, 581, 583, 585, 587, 589, 591, 593, 595, 597, 599, 601, 603, 605, 607, 609, 611, 613, 615, 617, 619, 621, 623, 625, 627, or 637, a variant, derivative, orthologue, paralogue or homologue thereof, in which: the amino acid at Mutated site 4 is Lys, and the amino acid at Mutated site 5 is Arg.

[0978] In another preferred embodiment, the mutated PPO comprises a sequence of SEQ ID NO: 1, 2, 3, 4, 5, 6, 7, 8, 9, 10, 11, 12, 13, 14, 15, 16, 17, 18, 19, 20, 21, 22, 23, 24, 25, 26, 27, 28, 29, 30, 31, 32, 33, 34, 35, 36, 37, 38, 39, 40, 41, 42, 43, 44, 45, 46, 47, 48, 49, 50, 51, 52, 53, 54, 55, 56, 57, 58, 59, 60, 61, 62, 63, 64, 65, 66, 67, 68, 69, 70, 71, 72, 73, 74, 75, 76, 77, 78, 79, 80, 81, 82, 83, 84, 85, 86, 87, 88, 89, 90, 91, 92, 93, 94, 95, 96, 97, 98, 99, 100, 101, 102, 103, 104, 105, 106, 107, 108, 109, 110, 111, 112, 113, 114, 115, 116, 117, 577, 579, 581, 583, 585, 587, 589, 591, 593, 595, 597, 599, 601, 603, 605, 607, 609, 611, 613, 615, 617, 619, 621, 623, 625, 627, or 637, a variant, derivative, orthologue, paralogue or homologue thereof, in which: the amino acid at Mutated site 4 is Lys, and the amino acid at Mutated site 5 is Tyr.

[0979] In another preferred embodiment, the mutated PPO comprises a sequence of SEQ ID NO: 1, 2, 3, 4, 5, 6, 7, 8, 9, 10, 11, 12, 13, 14, 15, 16, 17, 18, 19, 20, 21, 22, 23, 24, 25, 26, 27, 28, 29, 30, 31, 32, 33, 34, 35, 36, 37, 38, 39, 40, 41, 42, 43, 44, 45, 46, 47, 48, 49, 50, 51, 52, 53, 54, 55, 56, 57, 58, 59, 60, 61, 62, 63, 64, 65, 66, 67, 68, 69, 70, 71, 72, 73, 74, 75, 76, 77, 78, 79, 80, 81, 82, 83, 84, 85, 86, 87, 88, 89, 90, 91, 92, 93, 94, 95, 96, 97, 98, 99, 100, 101, 102, 103, 104, 105, 106, 107, 108, 109, 110, 111, 112, 113, 114, 115, 116, 117, 577, 579, 581, 583, 585, 587, 589, 591, 593, 595, 597, 599, 601, 603, 605, 607, 609, 611, 613, 615, 617, 619, 621, 623, 625, 627, or 637, a variant, derivative, orthologue, paralogue or homologue thereof, in which: the amino acid at Mutated site 4 is Lys, and the amino acid at Mutated site 5 is Trp.

[0980] In another preferred embodiment, the mutated PPO comprises a sequence of SEQ ID NO: 1, 2, 3, 4, 5, 6, 7, 8, 9, 10, 11, 12, 13, 14, 15, 16, 17, 18, 19, 20, 21, 22, 23, 24, 25, 26, 27, 28, 29, 30, 31, 32, 33, 34, 35, 36, 37, 38, 39, 40, 41, 42, 43, 44, 45, 46, 47, 48, 49, 50, 51, 52, 53, 54, 55, 56, 57, 58, 59, 60, 61, 62, 63, 64, 65, 66, 67, 68, 69, 70, 71, 72, 73, 74, 75, 76, 77, 78, 79, 80, 81, 82, 83, 84, 85, 86, 87, 88, 89, 90, 91, 92, 93, 94, 95, 96, 97, 98, 99, 100, 101, 102, 103, 104, 105, 106, 107, 108, 109, 110, 111, 112, 113, 114, 115, 116, 117, 577, 579, 581, 583, 585, 587, 589, 591, 593, 595, 597, 599, 601, 603, 605, 607, 609, 611, 613, 615, 617, 619, 621, 623, 625, 627, or 637, a variant, derivative, orthologue, paralogue or homologue thereof, in which: the amino acid at Mutated site 4 is Asp, and the amino acid at Mutated site 5 is Ala.

[0981] In another preferred embodiment, the mutated PPO comprises a sequence of SEQ ID NO: 1, 2, 3, 4, 5, 6, 7, 8, 9, 10, 11, 12, 13, 14, 15, 16, 17, 18, 19, 20, 21, 22, 23, 24, 25, 26, 27, 28, 29, 30, 31, 32, 33, 34, 35, 36, 37, 38, 39, 40, 41, 42, 43, 44, 45, 46, 47, 48, 49, 50, 51, 52, 53, 54, 55, 56, 57, 58, 59, 60, 61, 62, 63, 64, 65, 66, 67, 68, 69, 70, 71, 72, 73, 74, 75, 76, 77, 78, 79, 80, 81, 82, 83, 84, 85, 86, 87, 88, 89, 90, 91, 92, 93, 94, 95, 96, 97, 98, 99, 100, 101, 102, 103, 104, 105, 106, 107, 108, 109, 110, 111, 112, 113, 114, 115, 116, 117, 577, 579, 581, 583, 585, 587, 589, 591, 593, 595, 597, 599, 601, 603, 605, 607, 609, 611, 613, 615, 617, 619, 621, 623, 625, 627, or 637, a variant, derivative, orthologue, paralogue or homologue thereof, in which: the amino acid at Mutated site 4 is Asp, and the amino acid at Mutated site 5 is Leu.

[0982] In another preferred embodiment, the mutated PPO comprises a sequence of SEQ ID NO: 1, 2, 3, 4, 5, 6, 7, 8, 9, 10, 11, 12, 13, 14, 15, 16, 17, 18, 19, 20, 21, 22, 23, 24, 25, 26, 27, 28, 29, 30, 31, 32, 33, 34, 35, 36, 37, 38, 39, 40, 41, 42, 43, 44, 45, 46, 47, 48, 49, 50, 51, 52, 53, 54, 55, 56, 57, 58, 59, 60, 61, 62, 63, 64, 65, 66, 67, 68, 69, 70, 71, 72, 73, 74, 75, 76, 77, 78, 79, 80, 81, 82, 83, 84, 85, 86, 87, 88, 89, 90, 91, 92, 93, 94, 95, 96, 97, 98, 99, 100, 101, 102, 103, 104, 105, 106, 107, 108, 109, 110, 111, 112, 113, 114, 115, 116, 117, 577, 579, 581, 583, 585, 587, 589, 591, 593, 595, 597, 599, 601, 603, 605, 607, 609, 611, 613, 615, 617, 619, 621, 623, 625, 627, or 637, a variant, derivative, orthologue, paralogue or homologue thereof, in which: the amino acid at Mutated site 4 is Asp, and the amino acid at Mutated site 5 is Val.

[0983] In another preferred embodiment, the mutated PPO comprises a sequence of SEQ ID NO: 1, 2, 3, 4, 5, 6, 7, 8, 9, 10, 11, 12, 13, 14, 15, 16, 17, 18, 19, 20, 21, 22, 23, 24, 25, 26, 27, 28, 29, 30, 31, 32, 33, 34, 35, 36, 37, 38, 39, 40, 41, 42, 43, 44, 45, 46, 47, 48, 49, 50, 51, 52, 53, 54, 55, 56, 57, 58, 59, 60, 61, 62, 63, 64, 65, 66, 67, 68, 69, 70, 71, 72, 73, 74, 75, 76, 77, 78, 79, 80, 81, 82, 83, 84, 85, 86, 87, 88, 89, 90, 91, 92, 93, 94, 95, 96, 97, 98, 99, 100, 101, 102, 103, 104, 105, 106, 107, 108, 109, 110, 111, 112, 113, 114, 115, 116, 117, 577, 579, 581, 583, 585, 587, 589, 591, 593, 595, 597, 599, 601,603, 605, 607, 609, 611,613, 615, 617, 619, 621,623, 625, 627, or 637, a variant, derivative, orthologue, paralogue or homologue thereof, in which: the amino acid at Mutated site 4 is Asp, and the amino acid at Mutated site 5 is Ile.

[0984] In another preferred embodiment, the mutated PPO comprises a sequence of SEQ ID NO: 1, 2, 3, 4, 5, 6, 7, 8, 9, 10, 11, 12, 13, 14, 15, 16, 17, 18, 19, 20, 21, 22, 23, 24, 25, 26, 27, 28, 29, 30, 31, 32, 33, 34, 35, 36, 37, 38, 39, 40, 41, 42, 43, 44, 45, 46, 47, 48, 49, 50, 51, 52, 53, 54, 55, 56, 57, 58, 59, 60, 61, 62, 63, 64, 65, 66, 67, 68, 69, 70, 71, 72, 73, 74, 75, 76, 77, 78, 79, 80, 81, 82, 83, 84, 85, 86, 87, 88, 89, 90, 91, 92, 93, 94, 95, 96, 97, 98, 99, 100, 101, 102, 103, 104, 105, 106, 107, 108, 109, 110, 111, 112, 113, 114, 115, 116, 117, 577, 579, 581, 583, 585, 587, 589, 591, 593, 595, 597, 599, 601, 603, 605, 607, 609, 611, 613, 615, 617, 619, 621, 623, 625, 627, or 637, a variant, derivative, orthologue, paralogue or homologue thereof, in which: the amino acid at Mutated site 4 is Asp, and the amino acid at Mutated site 5 is Met.

[0985] In another preferred embodiment, the mutated PPO comprises a sequence of SEQ ID NO: 1, 2, 3, 4, 5, 6, 7, 8, 9, 10, 11, 12, 13, 14, 15, 16, 17, 18, 19, 20, 21, 22, 23, 24, 25, 26, 27, 28, 29, 30, 31, 32, 33, 34, 35, 36, 37, 38, 39, 40, 41, 42, 43, 44, 45, 46, 47, 48, 49, 50, 51, 52, 53, 54, 55, 56, 57, 58, 59, 60, 61, 62, 63, 64, 65, 66, 67, 68, 69, 70, 71, 72, 73, 74, 75, 76, 77, 78, 79, 80, 81, 82, 83, 84, 85, 86, 87, 88, 89, 90, 91, 92, 93, 94, 95, 96, 97, 98, 99, 100, 101, 102, 103, 104, 105, 106, 107, 108, 109, 110, 111, 112, 113, 114, 115, 116, 117, 577, 579, 581, 583, 585, 587, 589, 591, 593, 595, 597, 599, 601, 603, 605, 607, 609, 611, 613, 615, 617, 619, 621, 623, 625, 627, or 637, a variant, derivative, orthologue, paralogue or homologue thereof, in which: the amino acid at Mutated site 4 is Asp, and the amino acid at Mutated site 5 is His.

[0986] In another preferred embodiment, the mutated PPO comprises a sequence of SEQ ID NO: 1, 2, 3, 4, 5, 6, 7, 8, 9, 10, 11, 12, 13, 14, 15, 16, 17, 18, 19, 20, 21, 22, 23, 24, 25, 26, 27, 28, 29, 30, 31, 32, 33, 34, 35, 36, 37, 38, 39, 40, 41, 42, 43, 44, 45, 46, 47, 48, 49, 50, 51, 52, 53, 54, 55, 56, 57, 58, 59, 60, 61, 62, 63, 64, 65, 66, 67, 68, 69, 70, 71, 72, 73, 74, 75, 76, 77, 78, 79, 80, 81, 82, 83, 84, 85, 86, 87, 88, 89, 90, 91, 92, 93, 94, 95, 96, 97, 98, 99, 100, 101, 102, 103, 104, 105, 106, 107, 108, 109, 110, 111, 112, 113, 114, 115, 116, 117, 577, 579, 581, 583, 585, 587, 589, 591, 593, 595, 597, 599, 601, 603, 605, 607, 609, 611, 613, 615, 617, 619, 621, 623, 625, 627, or 637, a variant, derivative, orthologue, paralogue or homologue thereof, in which: the amino acid at Mutated site 4 is Asp, and the amino acid at Mutated site 5 is Lys.

[0987] In another preferred embodiment, the mutated PPO comprises a sequence of SEQ ID NO: 1, 2, 3, 4, 5, 6, 7, 8, 9, 10, 11, 12, 13, 14, 15, 16, 17, 18, 19, 20, 21, 22, 23, 24, 25, 26, 27, 28, 29, 30, 31, 32, 33, 34, 35, 36, 37, 38, 39, 40, 41, 42, 43, 44, 45, 46, 47, 48, 49, 50, 51, 52, 53, 54, 55, 56, 57, 58, 59, 60, 61, 62, 63, 64, 65, 66, 67, 68, 69, 70, 71, 72, 73, 74, 75, 76, 77, 78, 79, 80, 81, 82, 83, 84, 85, 86, 87, 88, 89, 90, 91, 92, 93, 94, 95, 96, 97, 98, 99, 100, 101, 102, 103, 104, 105, 106, 107, 108, 109, 110, 111, 112, 113, 114, 115, 116, 117, 577, 579, 581, 583, 585, 587, 589, 591, 593, 595, 597, 599, 601, 603, 605, 607, 609, 611, 613, 615, 617, 619, 621, 623, 625, 627, or 637, a variant, derivative, orthologue, paralogue or homologue thereof, in which: the amino acid at Mutated site 4 is Asp, and the amino acid at Mutated site 5 is Asp.

[0988] In another preferred embodiment, the mutated PPO comprises a sequence of SEQ ID NO: 1, 2, 3, 4, 5, 6, 7, 8, 9, 10, 11, 12, 13, 14, 15, 16, 17, 18, 19, 20, 21, 22, 23, 24, 25, 26, 27, 28, 29, 30, 31, 32, 33, 34, 35, 36, 37, 38, 39, 40, 41, 42, 43, 44, 45, 46, 47, 48, 49, 50, 51, 52, 53, 54, 55, 56, 57, 58, 59, 60, 61, 62, 63, 64, 65, 66, 67, 68, 69, 70, 71, 72, 73, 74, 75, 76, 77, 78, 79, 80, 81, 82, 83, 84, 85, 86, 87, 88, 89, 90, 91, 92, 93, 94, 95, 96, 97, 98, 99, 100, 101, 102, 103, 104, 105, 106, 107, 108, 109, 110, 111, 112, 113, 114, 115, 116, 117, 577, 579, 581, 583, 585, 587, 589, 591, 593, 595, 597, 599, 601, 603, 605, 607, 609, 611, 613, 615, 617, 619, 621, 623, 625, 627, or 637, a variant, derivative, orthologue, paralogue or homologue thereof, in which: the amino acid at Mutated site 4 is Asp, and the amino acid at Mutated site 5 is Glu.

[0989] In another preferred embodiment, the mutated PPO comprises a sequence of SEQ ID NO: 1, 2, 3, 4, 5, 6, 7, 8, 9, 10, 11, 12, 13, 14, 15, 16, 17, 18, 19, 20, 21, 22, 23, 24, 25, 26, 27, 28, 29, 30, 31, 32, 33, 34, 35, 36, 37, 38, 39, 40, 41, 42, 43, 44, 45, 46, 47, 48, 49, 50, 51, 52, 53, 54, 55, 56, 57, 58, 59, 60, 61, 62, 63, 64, 65, 66, 67, 68, 69, 70, 71, 72, 73, 74, 75, 76, 77, 78, 79, 80, 81, 82, 83, 84, 85, 86, 87, 88, 89, 90, 91, 92, 93, 94, 95, 96, 97, 98, 99, 100, 101, 102, 103, 104, 105, 106, 107, 108, 109, 110, 111, 112, 113, 114, 115, 116, 117, 577, 579, 581, 583, 585, 587, 589, 591, 593, 595, 597, 599, 601, 603, 605, 607, 609, 611, 613, 615, 617, 619, 621, 623, 625, 627, or 637, a variant, derivative, orthologue, paralogue or homologue thereof, in which: the amino acid at Mutated site 4 is Asp, and the amino acid at Mutated site 5 is Ser.

[0990] In another preferred embodiment, the mutated PPO comprises a sequence of SEQ ID NO: 1, 2, 3, 4, 5, 6, 7, 8, 9, 10, 11, 12, 13, 14, 15, 16, 17, 18, 19, 20, 21, 22, 23, 24, 25, 26, 27, 28, 29, 30, 31, 32, 33, 34, 35, 36, 37, 38, 39, 40, 41, 42, 43, 44, 45, 46, 47, 48, 49, 50, 51, 52, 53, 54, 55, 56, 57, 58, 59, 60, 61, 62, 63, 64, 65, 66, 67, 68, 69, 70, 71, 72, 73, 74, 75, 76, 77, 78, 79, 80, 81, 82, 83, 84, 85, 86, 87, 88, 89, 90, 91, 92, 93, 94, 95, 96, 97, 98, 99, 100, 101, 102, 103, 104, 105, 106, 107, 108, 109, 110, 111, 112, 113, 114, 115, 116, 117, 577, 579, 581, 583, 585, 587, 589, 591, 593, 595, 597, 599, 601, 603, 605, 607, 609, 611, 613, 615, 617, 619, 621, 623, 625, 627, or 637, a variant, derivative, orthologue, paralogue or homologue thereof, in which: the amino acid at Mutated site 4 is Asp, and the amino acid at Mutated site 5 is Thr.

[0991] In another preferred embodiment, the mutated PPO comprises a sequence of SEQ ID NO: 1, 2, 3, 4, 5, 6, 7, 8, 9, 10, 11, 12, 13, 14, 15, 16, 17, 18, 19, 20, 21, 22, 23, 24, 25, 26, 27, 28, 29, 30, 31, 32, 33, 34, 35, 36, 37, 38, 39, 40, 41, 42, 43, 44, 45, 46, 47, 48, 49, 50, 51, 52, 53, 54, 55, 56, 57, 58, 59, 60, 61, 62, 63, 64, 65, 66, 67, 68, 69, 70, 71, 72, 73, 74, 75, 76, 77, 78, 79, 80, 81, 82, 83, 84, 85, 86, 87, 88, 89, 90, 91, 92, 93, 94, 95, 96, 97, 98, 99, 100, 101, 102, 103, 104, 105, 106, 107, 108, 109, 110, 111, 112, 113, 114, 115, 116, 117, 577, 579, 581, 583, 585, 587, 589, 591, 593, 595, 597, 599, 601, 603, 605, 607, 609, 611, 613, 615, 617, 619, 621, 623, 625, 627, or 637, a variant, derivative, orthologue, paralogue or homologue thereof, in which: the amino acid at Mutated site 4 is Asp, and the amino acid at Mutated site 5 is Asn.

[0992] In another preferred embodiment, the mutated PPO comprises a sequence of SEQ ID NO: 1, 2, 3, 4, 5, 6, 7, 8, 9, 10, 11, 12, 13, 14, 15, 16, 17, 18, 19, 20, 21, 22, 23, 24, 25, 26, 27, 28, 29, 30, 31, 32, 33, 34, 35, 36, 37, 38, 39, 40, 41, 42, 43, 44, 45, 46, 47, 48, 49, 50, 51, 52, 53, 54, 55, 56, 57, 58, 59, 60, 61, 62, 63, 64, 65, 66, 67, 68, 69, 70, 71, 72, 73, 74, 75, 76, 77, 78, 79, 80, 81, 82, 83, 84, 85, 86, 87, 88, 89, 90, 91, 92, 93, 94, 95, 96, 97, 98, 99, 100, 101, 102, 103, 104, 105, 106, 107, 108, 109, 110, 111, 112, 113, 114, 115, 116, 117, 577, 579, 581, 583, 585, 587, 589, 591, 593, 595, 597, 599, 601,603, 605, 607, 609, 611,613, 615, 617, 619, 621,623, 625, 627, or 637, a variant, derivative, orthologue, paralogue or homologue thereof, in which: the amino acid at Mutated site 4 is Asp, and the amino acid at Mutated site 5 is Gln.

[0993] In another preferred embodiment, the mutated PPO comprises a sequence of SEQ ID NO: 1, 2, 3, 4, 5, 6, 7, 8, 9, 10, 11, 12, 13, 14, 15, 16, 17, 18, 19, 20, 21, 22, 23, 24, 25, 26, 27, 28, 29, 30, 31, 32, 33, 34, 35, 36, 37, 38, 39, 40, 41, 42, 43, 44, 45, 46, 47, 48, 49, 50, 51, 52, 53, 54, 55, 56, 57, 58, 59, 60, 61, 62, 63, 64, 65, 66, 67, 68, 69, 70, 71, 72, 73, 74, 75, 76, 77, 78, 79, 80, 81, 82, 83, 84, 85, 86, 87, 88, 89, 90, 91, 92, 93, 94, 95, 96, 97, 98, 99, 100, 101, 102, 103, 104, 105, 106, 107, 108, 109, 110, 111, 112, 113, 114, 115, 116, 117, 577, 579, 581, 583, 585, 587, 589, 591, 593, 595, 597, 599, 601, 603, 605, 607, 609, 611, 613, 615, 617, 619, 621, 623, 625, 627, or 637, a variant, derivative, orthologue, paralogue or homologue thereof, in which: the amino acid at Mutated site 4 is Asp, and the amino acid at Mutated site 5 is Cys.

[0994] In another preferred embodiment, the mutated PPO comprises a sequence of SEQ ID NO: 1, 2, 3, 4, 5, 6, 7, 8, 9, 10, 11, 12, 13, 14, 15, 16, 17, 18, 19, 20, 21, 22, 23, 24, 25, 26, 27, 28, 29, 30, 31, 32, 33, 34, 35, 36, 37, 38, 39, 40, 41, 42, 43, 44, 45, 46, 47, 48, 49, 50, 51, 52, 53, 54, 55, 56, 57, 58, 59, 60, 61, 62, 63, 64, 65, 66, 67, 68, 69, 70, 71, 72, 73, 74, 75, 76, 77, 78, 79, 80, 81, 82, 83, 84, 85, 86, 87, 88, 89, 90, 91, 92, 93, 94, 95, 96, 97, 98, 99, 100, 101, 102, 103, 104, 105, 106, 107, 108, 109, 110, 111, 112, 113, 114, 115, 116, 117, 577, 579, 581, 583, 585, 587, 589, 591, 593, 595, 597, 599, 601, 603, 605, 607, 609, 611, 613, 615, 617, 619, 621, 623, 625, 627, or 637, a variant, derivative, orthologue, paralogue or homologue thereof, in which: the amino acid at Mutated site 4 is Asp, and the amino acid at Mutated site 5 is Gly.

[0995] In another preferred embodiment, the mutated PPO comprises a sequence of SEQ ID NO: 1, 2, 3, 4, 5, 6, 7, 8, 9, 10, 11, 12, 13, 14, 15, 16, 17, 18, 19, 20, 21, 22, 23, 24, 25, 26, 27, 28, 29, 30, 31, 32, 33, 34, 35, 36, 37, 38, 39, 40, 41, 42, 43, 44, 45, 46, 47, 48, 49, 50, 51, 52, 53, 54, 55, 56, 57, 58, 59, 60, 61, 62, 63, 64, 65, 66, 67, 68, 69, 70, 71, 72, 73, 74, 75, 76, 77, 78, 79, 80, 81, 82, 83, 84, 85, 86, 87, 88, 89, 90, 91, 92, 93, 94, 95, 96, 97, 98, 99, 100, 101, 102, 103, 104, 105, 106, 107, 108, 109, 110, 111, 112, 113, 114, 115, 116, 117, 577, 579, 581, 583, 585, 587, 589, 591, 593, 595, 597, 599, 601, 603, 605, 607, 609, 611, 613, 615, 617, 619, 621, 623, 625, 627, or 637, a variant, derivative, orthologue, paralogue or homologue thereof, in which: the amino acid at Mutated site 4 is Asp, and the amino acid at Mutated site 5 is Pro.

[0996] In another preferred embodiment, the mutated PPO comprises a sequence of SEQ ID NO: 1, 2, 3, 4, 5, 6, 7, 8, 9, 10, 11, 12, 13, 14, 15, 16, 17, 18, 19, 20, 21, 22, 23, 24, 25, 26, 27, 28, 29, 30, 31, 32, 33, 34, 35, 36, 37, 38, 39, 40, 41, 42, 43, 44, 45, 46, 47, 48, 49, 50, 51, 52, 53, 54, 55, 56, 57, 58, 59, 60, 61, 62, 63, 64, 65, 66, 67, 68, 69, 70, 71, 72, 73, 74, 75, 76, 77, 78, 79, 80, 81, 82, 83, 84, 85, 86, 87, 88, 89, 90, 91, 92, 93, 94, 95, 96, 97, 98, 99, 100, 101, 102, 103, 104, 105, 106, 107, 108, 109, 110, 111, 112, 113, 114, 115, 116, 117, 577, 579, 581, 583, 585, 587, 589, 591, 593, 595, 597, 599, 601,603, 605, 607, 609, 611,613, 615, 617, 619, 621,623, 625, 627, or 637, a variant, derivative, orthologue, paralogue or homologue thereof, in which: the amino acid at Mutated site 4 is Asp, and the amino acid at Mutated site 5 is Arg.

[0997] In another preferred embodiment, the mutated PPO comprises a sequence of SEQ ID NO: 1, 2, 3, 4, 5, 6, 7, 8, 9, 10, 11, 12, 13, 14, 15, 16, 17, 18, 19, 20, 21, 22, 23, 24, 25, 26, 27, 28, 29, 30, 31, 32, 33, 34, 35, 36, 37, 38, 39, 40, 41, 42, 43, 44, 45, 46, 47, 48, 49, 50, 51, 52, 53, 54, 55, 56, 57, 58, 59, 60, 61, 62, 63, 64, 65, 66, 67, 68, 69, 70, 71, 72, 73, 74, 75, 76, 77, 78, 79, 80, 81, 82, 83, 84, 85, 86, 87, 88, 89, 90, 91, 92, 93, 94, 95, 96, 97, 98, 99, 100, 101, 102, 103, 104, 105, 106, 107, 108, 109, 110, 111, 112, 113, 114, 115, 116, 117, 577, 579, 581, 583, 585, 587, 589, 591, 593, 595, 597, 599, 601, 603, 605, 607, 609, 611, 613, 615, 617, 619, 621, 623, 625, 627, or 637, a variant, derivative, orthologue, paralogue or homologue thereof, in which: the amino acid at Mutated site 4 is Asp, and the amino acid at Mutated site 5 is Tyr.

[0998] In another preferred embodiment, the mutated PPO comprises a sequence of SEQ ID NO: 1, 2, 3, 4, 5, 6, 7, 8, 9, 10, 11, 12, 13, 14, 15, 16, 17, 18, 19, 20, 21, 22, 23, 24, 25, 26, 27, 28, 29, 30, 31, 32, 33, 34, 35, 36, 37, 38, 39, 40, 41, 42, 43, 44, 45, 46, 47, 48, 49, 50, 51, 52, 53, 54, 55, 56, 57, 58, 59, 60, 61, 62, 63, 64, 65, 66, 67, 68, 69, 70, 71, 72, 73, 74, 75, 76, 77, 78, 79, 80, 81, 82, 83, 84, 85, 86, 87, 88, 89, 90, 91, 92, 93, 94, 95, 96, 97, 98, 99, 100, 101, 102, 103, 104, 105, 106, 107, 108, 109, 110, 111, 112, 113, 114, 115, 116, 117, 577, 579, 581, 583, 585, 587, 589, 591, 593, 595, 597, 599, 601, 603, 605, 607, 609, 611, 613, 615, 617, 619, 621, 623, 625, 627, or 637, a variant, derivative, orthologue, paralogue or homologue thereof, in which: the amino acid at Mutated site 4 is Asp, and the amino acid at Mutated site 5 is Trp.

[0999] In another preferred embodiment, the mutated PPO comprises a sequence of SEQ ID NO: 1, 2, 3, 4, 5, 6, 7, 8, 9, 10, 11, 12, 13, 14, 15, 16, 17, 18, 19, 20, 21, 22, 23, 24, 25, 26, 27, 28, 29, 30, 31, 32, 33, 34, 35, 36, 37, 38, 39, 40, 41, 42, 43, 44, 45, 46, 47, 48, 49, 50, 51, 52, 53, 54, 55, 56, 57, 58, 59, 60, 61, 62, 63, 64, 65, 66, 67, 68, 69, 70, 71, 72, 73, 74, 75, 76, 77, 78, 79, 80, 81, 82, 83, 84, 85, 86, 87, 88, 89, 90, 91, 92, 93, 94, 95, 96, 97, 98, 99, 100, 101, 102, 103, 104, 105, 106, 107, 108, 109, 110, 111, 112, 113, 114, 115, 116, 117, 577, 579, 581, 583, 585, 587, 589, 591, 593, 595, 597, 599, 601, 603, 605, 607, 609, 611, 613, 615, 617, 619, 621, 623, 625, 627, or 637, a variant, derivative, orthologue, paralogue or homologue thereof, in which: the amino acid at Mutated site 4 is Glu, and the amino acid at Mutated site 5 is Ala.

[1000] In another preferred embodiment, the mutated PPO comprises a sequence of SEQ ID NO: 1, 2, 3, 4, 5, 6, 7, 8, 9, 10, 11, 12, 13, 14, 15, 16, 17, 18, 19, 20, 21, 22, 23, 24, 25, 26, 27, 28, 29, 30, 31, 32, 33, 34, 35, 36, 37, 38, 39, 40, 41, 42, 43, 44, 45, 46, 47, 48, 49, 50, 51, 52, 53, 54, 55, 56, 57, 58, 59, 60, 61, 62, 63, 64, 65, 66, 67, 68, 69, 70, 71, 72, 73, 74, 75, 76, 77, 78, 79, 80, 81, 82, 83, 84, 85, 86, 87, 88, 89, 90, 91, 92, 93, 94, 95, 96, 97, 98, 99, 100, 101, 102, 103, 104, 105, 106, 107, 108, 109, 110, 111, 112, 113, 114, 115, 116, 117, 577, 579, 581, 583, 585, 587, 589, 591, 593, 595, 597, 599, 601, 603, 605, 607, 609, 611, 613, 615, 617, 619, 621, 623, 625, 627, or 637, a variant, derivative, orthologue, paralogue or homologue thereof, in which: the amino acid at Mutated site 4 is Glu, and the amino acid at Mutated site 5 is Leu.

[1001] In another preferred embodiment, the mutated PPO comprises a sequence of SEQ ID NO: 1, 2, 3, 4, 5, 6, 7, 8, 9, 10, 11, 12, 13, 14, 15, 16, 17, 18, 19, 20, 21, 22, 23, 24, 25, 26, 27, 28, 29, 30, 31, 32, 33, 34, 35, 36, 37, 38, 39, 40, 41, 42, 43, 44, 45, 46, 47, 48, 49, 50, 51, 52, 53, 54, 55, 56, 57, 58, 59, 60, 61, 62, 63, 64, 65, 66, 67, 68, 69, 70, 71, 72, 73, 74, 75, 76, 77, 78, 79, 80, 81, 82, 83, 84, 85, 86, 87, 88, 89, 90, 91, 92, 93, 94, 95, 96, 97, 98, 99, 100, 101, 102, 103, 104, 105, 106, 107, 108, 109, 110, 111, 112, 113, 114, 115, 116, 117, 577, 579, 581, 583, 585, 587, 589, 591, 593, 595, 597, 599, 601, 603, 605, 607, 609, 611, 613, 615, 617, 619, 621, 623, 625, 627, or 637, a variant, derivative, orthologue, paralogue or homologue thereof, in which: the amino acid at Mutated site 4 is Glu, and the amino acid at Mutated site 5 is Val.

[1002] In another preferred embodiment, the mutated PPO comprises a sequence of SEQ ID NO: 1, 2, 3, 4, 5, 6, 7, 8, 9, 10, 11, 12, 13, 14, 15, 16, 17, 18, 19, 20, 21, 22, 23, 24, 25, 26, 27, 28, 29, 30, 31, 32, 33, 34, 35, 36, 37, 38, 39, 40, 41, 42, 43, 44, 45, 46, 47, 48, 49, 50, 51, 52, 53, 54, 55, 56, 57, 58, 59, 60, 61, 62, 63, 64, 65, 66, 67, 68, 69, 70, 71, 72, 73, 74, 75, 76, 77, 78, 79, 80, 81, 82, 83, 84, 85, 86, 87, 88, 89, 90, 91, 92, 93, 94, 95, 96, 97, 98, 99, 100, 101, 102, 103, 104, 105, 106, 107, 108, 109, 110, 111, 112, 113, 114, 115, 116, 117, 577, 579, 581, 583, 585, 587, 589, 591, 593, 595, 597, 599, 601, 603, 605, 607, 609, 611, 613, 615, 617, 619, 621, 623, 625, 627, or 637, a variant, derivative, orthologue, paralogue or homologue thereof, in which: the amino acid at Mutated site 4 is Glu, and the amino acid at Mutated site 5 is Ile.

[1003] In another preferred embodiment, the mutated PPO comprises a sequence of SEQ ID NO: 1, 2, 3, 4, 5, 6, 7, 8, 9, 10, 11, 12, 13, 14, 15, 16, 17, 18, 19, 20, 21, 22, 23, 24, 25, 26, 27, 28, 29, 30, 31, 32, 33, 34, 35, 36, 37, 38, 39, 40, 41, 42, 43, 44, 45, 46, 47, 48, 49, 50, 51, 52, 53, 54, 55, 56, 57, 58, 59, 60, 61, 62, 63, 64, 65, 66, 67, 68, 69, 70, 71, 72, 73, 74, 75, 76, 77, 78, 79, 80, 81, 82, 83, 84, 85, 86, 87, 88, 89, 90, 91, 92, 93, 94, 95, 96, 97, 98, 99, 100, 101, 102, 103, 104, 105, 106, 107, 108, 109, 110, 111, 112, 113, 114, 115, 116, 117, 577, 579, 581, 583, 585, 587, 589, 591, 593, 595, 597, 599, 601, 603, 605, 607, 609, 611, 613, 615, 617, 619, 621, 623, 625, 627, or 637, a variant, derivative, orthologue, paralogue or homologue thereof, in which: the amino acid at Mutated site 4 is Glu, and the amino acid at Mutated site 5 is Met.

[1004] In another preferred embodiment, the mutated PPO comprises a sequence of SEQ ID NO: 1, 2, 3, 4, 5, 6, 7, 8, 9, 10, 11, 12, 13, 14, 15, 16, 17, 18, 19, 20, 21, 22, 23, 24, 25, 26, 27, 28, 29, 30, 31, 32, 33, 34, 35, 36, 37, 38, 39, 40, 41, 42, 43, 44, 45, 46, 47, 48, 49, 50, 51, 52, 53, 54, 55, 56, 57, 58, 59, 60, 61, 62, 63, 64, 65, 66, 67, 68, 69, 70, 71, 72, 73, 74, 75, 76, 77, 78, 79, 80, 81, 82, 83, 84, 85, 86, 87, 88, 89, 90, 91, 92, 93, 94, 95, 96, 97, 98, 99, 100, 101, 102, 103, 104, 105, 106, 107, 108, 109, 110, 111, 112, 113, 114, 115, 116, 117, 577, 579, 581, 583, 585, 587, 589, 591, 593, 595, 597, 599, 601, 603, 605, 607, 609, 611, 613, 615, 617, 619, 621, 623, 625, 627, or 637, a variant, derivative, orthologue, paralogue or homologue thereof, in which: the amino acid at Mutated site 4 is Glu, and the amino acid at Mutated site 5 is His.

[1005] In another preferred embodiment, the mutated PPO comprises a sequence of SEQ ID NO: 1, 2, 3, 4, 5, 6, 7, 8, 9, 10, 11, 12, 13, 14, 15, 16, 17, 18, 19, 20, 21, 22, 23, 24, 25, 26, 27, 28, 29, 30, 31, 32, 33, 34, 35, 36, 37, 38, 39, 40, 41, 42, 43, 44, 45, 46, 47, 48, 49, 50, 51, 52, 53, 54, 55, 56, 57, 58, 59, 60, 61, 62, 63, 64, 65, 66, 67, 68, 69, 70, 71, 72, 73, 74, 75, 76, 77, 78, 79, 80, 81, 82, 83, 84, 85, 86, 87, 88, 89, 90, 91, 92, 93, 94, 95, 96, 97, 98, 99, 100, 101, 102, 103, 104, 105, 106, 107, 108, 109, 110, 111, 112, 113, 114, 115, 116, 117, 577, 579, 581, 583, 585, 587, 589, 591, 593, 595, 597, 599, 601, 603, 605, 607, 609, 611, 613, 615, 617, 619, 621, 623, 625, 627, or 637, a variant, derivative, orthologue, paralogue or homologue thereof, in which: the amino acid at Mutated site 4 is Glu, and the amino acid at Mutated site 5 is Lys.

[1006] In another preferred embodiment, the mutated PPO comprises a sequence of SEQ ID NO: 1, 2, 3, 4, 5, 6, 7, 8, 9, 10, 11, 12, 13, 14, 15, 16, 17, 18, 19, 20, 21, 22, 23, 24, 25, 26, 27, 28, 29, 30, 31, 32, 33, 34, 35, 36, 37, 38, 39, 40, 41, 42, 43, 44, 45, 46, 47, 48, 49, 50, 51, 52, 53, 54, 55, 56, 57, 58, 59, 60, 61, 62, 63, 64, 65, 66, 67, 68, 69, 70, 71, 72, 73, 74, 75, 76, 77, 78, 79, 80, 81, 82, 83, 84, 85, 86, 87, 88, 89, 90, 91, 92, 93, 94, 95, 96, 97, 98, 99, 100, 101, 102, 103, 104, 105, 106, 107, 108, 109, 110, 111, 112, 113, 114, 115, 116, 117, 577, 579, 581, 583, 585, 587, 589, 591, 593, 595, 597, 599, 601, 603, 605, 607, 609, 611, 613, 615, 617, 619, 621, 623, 625, 627, or 637, a variant, derivative, orthologue, paralogue or homologue thereof, in which: the amino acid at Mutated site 4 is Glu, and the amino acid at Mutated site 5 is Asp.

[1007] In another preferred embodiment, the mutated PPO comprises a sequence of SEQ ID NO: 1, 2, 3, 4, 5, 6, 7, 8, 9, 10, 11, 12, 13, 14, 15, 16, 17, 18, 19, 20, 21, 22, 23, 24, 25, 26, 27, 28, 29, 30, 31, 32, 33, 34, 35, 36, 37, 38, 39, 40, 41, 42, 43, 44, 45, 46, 47, 48, 49, 50, 51, 52, 53, 54, 55, 56, 57, 58, 59, 60, 61, 62, 63, 64, 65, 66, 67, 68, 69, 70, 71, 72, 73, 74, 75, 76, 77, 78, 79, 80, 81, 82, 83, 84, 85, 86, 87, 88, 89, 90, 91, 92, 93, 94, 95, 96, 97, 98, 99, 100, 101, 102, 103, 104, 105, 106, 107, 108, 109, 110, 111, 112, 113, 114, 115, 116, 117, 577, 579, 581, 583, 585, 587, 589, 591, 593, 595, 597, 599, 601, 603, 605, 607, 609, 611, 613, 615, 617, 619, 621, 623, 625, 627, or 637, a variant, derivative, orthologue, paralogue or homologue thereof, in which: the amino acid at Mutated site 4 is Glu, and the amino acid at Mutated site 5 is Glu.

[1008] In another preferred embodiment, the mutated PPO comprises a sequence of SEQ ID NO: 1, 2, 3, 4, 5, 6, 7, 8, 9, 10, 11, 12, 13, 14, 15, 16, 17, 18, 19, 20, 21, 22, 23, 24, 25, 26, 27, 28, 29, 30, 31, 32, 33, 34, 35, 36, 37, 38, 39, 40, 41, 42, 43, 44, 45, 46, 47, 48, 49, 50, 51, 52, 53, 54, 55, 56, 57, 58, 59, 60, 61, 62, 63, 64, 65, 66, 67, 68, 69, 70, 71, 72, 73, 74, 75, 76, 77, 78, 79, 80, 81, 82, 83, 84, 85, 86, 87, 88, 89, 90, 91, 92, 93, 94, 95, 96, 97, 98, 99, 100, 101, 102, 103, 104, 105, 106, 107, 108, 109, 110, 111, 112, 113, 114, 115, 116, 117, 577, 579, 581, 583, 585, 587, 589, 591, 593, 595, 597, 599, 601, 603, 605, 607, 609, 611, 613, 615, 617, 619, 621, 623, 625, 627, or 637, a variant, derivative, orthologue, paralogue or homologue thereof, in which: the amino acid at Mutated site 4 is Glu, and the amino acid at Mutated site 5 is Ser.

[1009] In another preferred embodiment, the mutated PPO comprises a sequence of SEQ ID NO: 1, 2, 3, 4, 5, 6, 7, 8, 9, 10, 11, 12, 13, 14, 15, 16, 17, 18, 19, 20, 21, 22, 23, 24, 25, 26, 27, 28, 29, 30, 31, 32, 33, 34, 35, 36, 37, 38, 39, 40, 41, 42, 43, 44, 45, 46, 47, 48, 49, 50, 51, 52, 53, 54, 55, 56, 57, 58, 59, 60, 61, 62, 63, 64, 65, 66, 67, 68, 69, 70, 71, 72, 73, 74, 75, 76, 77, 78, 79, 80, 81, 82, 83, 84, 85, 86, 87, 88, 89, 90, 91, 92, 93, 94, 95, 96, 97, 98, 99, 100, 101, 102, 103, 104, 105, 106, 107, 108, 109, 110, 111, 112, 113, 114, 115, 116, 117, 577, 579, 581, 583, 585, 587, 589, 591, 593, 595, 597, 599, 601, 603, 605, 607, 609, 611, 613, 615, 617, 619, 621, 623, 625, 627, or 637, a variant, derivative, orthologue, paralogue or homologue thereof, in which: the amino acid at Mutated site 4 is Glu, and the amino acid at Mutated site 5 is Thr.

[1010] In another preferred embodiment, the mutated PPO comprises a sequence of SEQ ID NO: 1, 2, 3, 4, 5, 6, 7, 8, 9, 10, 11, 12, 13, 14, 15, 16, 17, 18, 19, 20, 21, 22, 23, 24, 25, 26, 27, 28, 29, 30, 31, 32, 33, 34, 35, 36, 37, 38, 39, 40, 41, 42, 43, 44, 45, 46, 47, 48, 49, 50, 51, 52, 53, 54, 55, 56, 57, 58, 59, 60, 61, 62, 63, 64, 65, 66, 67, 68, 69, 70, 71, 72, 73, 74, 75, 76, 77, 78, 79, 80, 81, 82, 83, 84, 85, 86, 87, 88, 89, 90, 91, 92, 93, 94, 95, 96, 97, 98, 99, 100, 101, 102, 103, 104, 105, 106, 107, 108, 109, 110, 111, 112, 113, 114, 115, 116, 117, 577, 579, 581, 583, 585, 587, 589, 591, 593, 595, 597, 599, 601, 603, 605, 607, 609, 611, 613, 615, 617, 619, 621, 623, 625, 627, or 637, a variant, derivative, orthologue, paralogue or homologue thereof, in which: the amino acid at Mutated site 4 is Glu, and the amino acid at Mutated site 5 is Asn.

[1011] In another preferred embodiment, the mutated PPO comprises a sequence of SEQ ID NO: 1, 2, 3, 4, 5, 6, 7, 8, 9, 10, 11, 12, 13, 14, 15, 16, 17, 18, 19, 20, 21, 22, 23, 24, 25, 26, 27, 28, 29, 30, 31, 32, 33, 34, 35, 36, 37, 38, 39, 40, 41, 42, 43, 44, 45, 46, 47, 48, 49, 50, 51, 52, 53, 54, 55, 56, 57, 58, 59, 60, 61, 62, 63, 64, 65, 66, 67, 68, 69, 70, 71, 72, 73, 74, 75, 76, 77, 78, 79, 80, 81, 82, 83, 84, 85, 86, 87, 88, 89, 90, 91, 92, 93, 94, 95, 96, 97, 98, 99, 100, 101, 102, 103, 104, 105, 106, 107, 108, 109, 110, 111, 112, 113, 114, 115, 116, 117, 577, 579, 581, 583, 585, 587, 589, 591, 593, 595, 597, 599, 601, 603, 605, 607, 609, 611, 613, 615, 617, 619, 621, 623, 625, 627, or 637, a variant, derivative, orthologue, paralogue or homologue thereof, in which: the amino acid at Mutated site 4 is Glu, and the amino acid at Mutated site 5 is Gln.

[1012] In another preferred embodiment, the mutated PPO comprises a sequence of SEQ ID NO: 1, 2, 3, 4, 5, 6, 7, 8, 9, 10, 11, 12, 13, 14, 15, 16, 17, 18, 19, 20, 21, 22, 23, 24, 25, 26, 27, 28, 29, 30, 31, 32, 33, 34, 35, 36, 37, 38, 39, 40, 41, 42, 43, 44, 45, 46, 47, 48, 49, 50, 51, 52, 53, 54, 55, 56, 57, 58, 59, 60, 61, 62, 63, 64, 65, 66, 67, 68, 69, 70, 71, 72, 73, 74, 75, 76, 77, 78, 79, 80, 81, 82, 83, 84, 85, 86, 87, 88, 89, 90, 91, 92, 93, 94, 95, 96, 97, 98, 99, 100, 101, 102, 103, 104, 105, 106, 107, 108, 109, 110, 111, 112, 113, 114, 115, 116, 117, 577, 579, 581, 583, 585, 587, 589, 591, 593, 595, 597, 599, 601, 603, 605, 607, 609, 611, 613, 615, 617, 619, 621, 623, 625, 627, or 637, a variant, derivative, orthologue, paralogue or homologue thereof, in which: the amino acid at Mutated site 4 is Glu, and the amino acid at Mutated site 5 is Cys.

[1013] In another preferred embodiment, the mutated PPO comprises a sequence of SEQ ID NO: 1, 2, 3, 4, 5, 6, 7, 8, 9, 10, 11, 12, 13, 14, 15, 16, 17, 18, 19, 20, 21, 22, 23, 24, 25, 26, 27, 28, 29, 30, 31, 32, 33, 34, 35, 36, 37, 38, 39, 40, 41, 42, 43, 44, 45, 46, 47, 48, 49, 50, 51, 52, 53, 54, 55, 56, 57, 58, 59, 60, 61, 62, 63, 64, 65, 66, 67, 68, 69, 70, 71, 72, 73, 74, 75, 76, 77, 78, 79, 80, 81, 82, 83, 84, 85, 86, 87, 88, 89, 90, 91, 92, 93, 94, 95, 96, 97, 98, 99, 100, 101, 102, 103, 104, 105, 106, 107, 108, 109, 110, 111, 112, 113, 114, 115, 116, 117, 577, 579, 581, 583, 585, 587, 589, 591, 593, 595, 597, 599, 601, 603, 605, 607, 609, 611, 613, 615, 617, 619, 621, 623, 625, 627, or 637, a variant, derivative, orthologue, paralogue or homologue thereof, in which: the amino acid at Mutated site 4 is Glu, and the amino acid at Mutated site 5 is Gly.

[1014] In another preferred embodiment, the mutated PPO comprises a sequence of SEQ ID NO: 1, 2, 3, 4, 5, 6, 7, 8, 9, 10, 11, 12, 13, 14, 15, 16, 17, 18, 19, 20, 21, 22, 23, 24, 25, 26, 27, 28, 29, 30, 31, 32, 33, 34, 35, 36, 37, 38, 39, 40, 41, 42, 43, 44, 45, 46, 47, 48, 49, 50, 51, 52, 53, 54, 55, 56, 57, 58, 59, 60, 61, 62, 63, 64, 65, 66, 67, 68, 69, 70, 71, 72, 73, 74, 75, 76, 77, 78, 79, 80, 81, 82, 83, 84, 85, 86, 87, 88, 89, 90, 91, 92, 93, 94, 95, 96, 97, 98, 99, 100, 101, 102, 103, 104, 105, 106, 107, 108, 109, 110, 111, 112, 113, 114, 115, 116, 117, 577, 579, 581, 583, 585, 587, 589, 591, 593, 595, 597, 599, 601, 603, 605, 607, 609, 611, 613, 615, 617, 619, 621, 623, 625, 627, or 637, a variant, derivative, orthologue, paralogue or homologue thereof, in which: the amino acid at Mutated site 4 is Glu, and the amino acid at Mutated site 5 is Pro.

[1015] In another preferred embodiment, the mutated PPO comprises a sequence of SEQ ID NO: 1, 2, 3, 4, 5, 6, 7, 8, 9, 10, 11, 12, 13, 14, 15, 16, 17, 18, 19, 20, 21, 22, 23, 24, 25, 26, 27, 28, 29, 30, 31, 32, 33, 34, 35, 36, 37, 38, 39, 40, 41, 42, 43, 44, 45, 46, 47, 48, 49, 50, 51, 52, 53, 54, 55, 56, 57, 58, 59, 60, 61, 62, 63, 64, 65, 66, 67, 68, 69, 70, 71, 72, 73, 74, 75, 76, 77, 78, 79, 80, 81, 82, 83, 84, 85, 86, 87, 88, 89, 90, 91, 92, 93, 94, 95, 96, 97, 98, 99, 100, 101, 102, 103, 104, 105, 106, 107, 108, 109, 110, 111, 112, 113, 114, 115, 116, 117, 577, 579, 581, 583, 585, 587, 589, 591, 593, 595, 597, 599, 601, 603, 605, 607, 609, 611, 613, 615, 617, 619, 621, 623, 625, 627, or 637, a variant, derivative, orthologue, paralogue or homologue thereof, in which: the amino acid at Mutated site 4 is Glu, and the amino acid at Mutated site 5 is Arg.

[1016] In another preferred embodiment, the mutated PPO comprises a sequence of SEQ ID NO: 1, 2, 3, 4, 5, 6, 7, 8, 9, 10, 11, 12, 13, 14, 15, 16, 17, 18, 19, 20, 21, 22, 23, 24, 25, 26, 27, 28, 29, 30, 31, 32, 33, 34, 35, 36, 37, 38, 39, 40, 41, 42, 43, 44, 45, 46, 47, 48, 49, 50, 51, 52, 53, 54, 55, 56, 57, 58, 59, 60, 61, 62, 63, 64, 65, 66, 67, 68, 69, 70, 71, 72, 73, 74, 75, 76, 77, 78, 79, 80, 81, 82, 83, 84, 85, 86, 87, 88, 89, 90, 91, 92, 93, 94, 95, 96, 97, 98, 99, 100, 101, 102, 103, 104, 105, 106, 107, 108, 109, 110, 111, 112, 113, 114, 115, 116, 117, 577, 579, 581, 583, 585, 587, 589, 591, 593, 595, 597, 599, 601,603, 605, 607, 609, 611,613, 615, 617, 619, 621,623, 625, 627, or 637, a variant, derivative, orthologue, paralogue or homologue thereof, in which: the amino acid at Mutated site 4 is Glu, and the amino acid at Mutated site 5 is Tyr.

[1017] In another preferred embodiment, the mutated PPO comprises a sequence of SEQ ID NO: 1, 2, 3, 4, 5, 6, 7, 8, 9, 10, 11, 12, 13, 14, 15, 16, 17, 18, 19, 20, 21, 22, 23, 24, 25, 26, 27, 28, 29, 30, 31, 32, 33, 34, 35, 36, 37, 38, 39, 40, 41, 42, 43, 44, 45, 46, 47, 48, 49, 50, 51, 52, 53, 54, 55, 56, 57, 58, 59, 60, 61, 62, 63, 64, 65, 66, 67, 68, 69, 70, 71, 72, 73, 74, 75, 76, 77, 78, 79, 80, 81, 82, 83, 84, 85, 86, 87, 88, 89, 90, 91, 92, 93, 94, 95, 96, 97, 98, 99, 100, 101, 102, 103, 104, 105, 106, 107, 108, 109, 110, 111, 112, 113, 114, 115, 116, 117, 577, 579, 581, 583, 585, 587, 589, 591, 593, 595, 597, 599, 601, 603, 605, 607, 609, 611, 613, 615, 617, 619, 621, 623, 625, 627, or 637, a variant, derivative, orthologue, paralogue or homologue thereof, in which: the amino acid at Mutated site 4 is Glu, and the amino acid at Mutated site 5 is Trp.

[1018] In another preferred embodiment, the mutated PPO comprises a sequence of SEQ ID NO: 1, 2, 3, 4, 5, 6, 7, 8, 9, 10, 11, 12, 13, 14, 15, 16, 17, 18, 19, 20, 21, 22, 23, 24, 25, 26, 27, 28, 29, 30, 31, 32, 33, 34, 35, 36, 37, 38, 39, 40, 41, 42, 43, 44, 45, 46, 47, 48, 49, 50, 51, 52, 53, 54, 55, 56, 57, 58, 59, 60, 61, 62, 63, 64, 65, 66, 67, 68, 69, 70, 71, 72, 73, 74, 75, 76, 77, 78, 79, 80, 81, 82, 83, 84, 85, 86, 87, 88, 89, 90, 91, 92, 93, 94, 95, 96, 97, 98, 99, 100, 101, 102, 103, 104, 105, 106, 107, 108, 109, 110, 111, 112, 113, 114, 115, 116, 117, 577, 579, 581, 583, 585, 587, 589, 591, 593, 595, 597, 599, 601, 603, 605, 607, 609, 611, 613, 615, 617, 619, 621, 623, 625, 627, or 637, a variant, derivative, orthologue, paralogue or homologue thereof, in which: the amino acid at Mutated site 4 is Ser, and the amino acid at Mutated site 5 is Ala.

[1019] In another preferred embodiment, the mutated PPO comprises a sequence of SEQ ID NO: 1, 2, 3, 4, 5, 6, 7, 8, 9, 10, 11, 12, 13, 14, 15, 16, 17, 18, 19, 20, 21, 22, 23, 24, 25, 26, 27, 28, 29, 30, 31, 32, 33, 34, 35, 36, 37, 38, 39, 40, 41, 42, 43, 44, 45, 46, 47, 48, 49, 50, 51, 52, 53, 54, 55, 56, 57, 58, 59, 60, 61, 62, 63, 64, 65, 66, 67, 68, 69, 70, 71, 72, 73, 74, 75, 76, 77, 78, 79, 80, 81, 82, 83, 84, 85, 86, 87, 88, 89, 90, 91, 92, 93, 94, 95, 96, 97, 98, 99, 100, 101, 102, 103, 104, 105, 106, 107, 108, 109, 110, 111, 112, 113, 114, 115, 116, 117, 577, 579, 581, 583, 585, 587, 589, 591, 593, 595, 597, 599, 601, 603, 605, 607, 609, 611, 613, 615, 617, 619, 621, 623, 625, 627, or 637, a variant, derivative, orthologue, paralogue or homologue thereof, in which: the amino acid at Mutated site 4 is Ser, and the amino acid at Mutated site 5 is Leu.

[1020] In another preferred embodiment, the mutated PPO comprises a sequence of SEQ ID NO: 1, 2, 3, 4, 5, 6, 7, 8, 9, 10, 11, 12, 13, 14, 15, 16, 17, 18, 19, 20, 21, 22, 23, 24, 25, 26, 27, 28, 29, 30, 31, 32, 33, 34, 35, 36, 37, 38, 39, 40, 41, 42, 43, 44, 45, 46, 47, 48, 49, 50, 51, 52, 53, 54, 55, 56, 57, 58, 59, 60, 61, 62, 63, 64, 65, 66, 67, 68, 69, 70, 71, 72, 73, 74, 75, 76, 77, 78, 79, 80, 81, 82, 83, 84, 85, 86, 87, 88, 89, 90, 91, 92, 93, 94, 95, 96, 97, 98, 99, 100, 101, 102, 103, 104, 105, 106, 107, 108, 109, 110, 111, 112, 113, 114, 115, 116, 117, 577, 579, 581, 583, 585, 587, 589, 591, 593, 595, 597, 599, 601, 603, 605, 607, 609, 611, 613, 615, 617, 619, 621, 623, 625, 627, or 637, a variant, derivative, orthologue, paralogue or homologue thereof, in which: the amino acid at Mutated site 4 is Ser, and the amino acid at Mutated site 5 is Val.

[1021] In another preferred embodiment, the mutated PPO comprises a sequence of SEQ ID NO: 1, 2, 3, 4, 5, 6, 7, 8, 9, 10, 11, 12, 13, 14, 15, 16, 17, 18, 19, 20, 21, 22, 23, 24, 25, 26, 27, 28, 29, 30, 31, 32, 33, 34, 35, 36, 37, 38, 39, 40, 41, 42, 43, 44, 45, 46, 47, 48, 49, 50, 51, 52, 53, 54, 55, 56, 57, 58, 59, 60, 61, 62, 63, 64, 65, 66, 67, 68, 69, 70, 71, 72, 73, 74, 75, 76, 77, 78, 79, 80, 81, 82, 83, 84, 85, 86, 87, 88, 89, 90, 91, 92, 93, 94, 95, 96, 97, 98, 99, 100, 101, 102, 103, 104, 105, 106, 107, 108, 109, 110, 111, 112, 113, 114, 115, 116, 117, 577, 579, 581, 583, 585, 587, 589, 591, 593, 595, 597, 599, 601, 603, 605, 607, 609, 611, 613, 615, 617, 619, 621, 623, 625, 627, or 637, a variant, derivative, orthologue, paralogue or homologue thereof, in which: the amino acid at Mutated site 4 is Ser, and the amino acid at Mutated site 5 is Ile.

[1022] In another preferred embodiment, the mutated PPO comprises a sequence of SEQ ID NO: 1, 2, 3, 4, 5, 6, 7, 8, 9, 10, 11, 12, 13, 14, 15, 16, 17, 18, 19, 20, 21, 22, 23, 24, 25, 26, 27, 28, 29, 30, 31, 32, 33, 34, 35, 36, 37, 38, 39, 40, 41, 42, 43, 44, 45, 46, 47, 48, 49, 50, 51, 52, 53, 54, 55, 56, 57, 58, 59, 60, 61, 62, 63, 64, 65, 66, 67, 68, 69, 70, 71, 72, 73, 74, 75, 76, 77, 78, 79, 80, 81, 82, 83, 84, 85, 86, 87, 88, 89, 90, 91, 92, 93, 94, 95, 96, 97, 98, 99, 100, 101, 102, 103, 104, 105, 106, 107, 108, 109, 110, 111, 112, 113, 114, 115, 116, 117, 577, 579, 581, 583, 585, 587, 589, 591, 593, 595, 597, 599, 601, 603, 605, 607, 609, 611, 613, 615, 617, 619, 621, 623, 625, 627, or 637, a variant, derivative, orthologue, paralogue or homologue thereof, in which: the amino acid at Mutated site 4 is Ser, and the amino acid at Mutated site 5 is Met.

[1023] In another preferred embodiment, the mutated PPO comprises a sequence of SEQ ID NO: 1, 2, 3, 4, 5, 6, 7, 8, 9, 10, 11, 12, 13, 14, 15, 16, 17, 18, 19, 20, 21, 22, 23, 24, 25, 26, 27, 28, 29, 30, 31, 32, 33, 34, 35, 36, 37, 38, 39, 40, 41, 42, 43, 44, 45, 46, 47, 48, 49, 50, 51, 52, 53, 54, 55, 56, 57, 58, 59, 60, 61, 62, 63, 64, 65, 66, 67, 68, 69, 70, 71, 72, 73, 74, 75, 76, 77, 78, 79, 80, 81, 82, 83, 84, 85, 86, 87, 88, 89, 90, 91, 92, 93, 94, 95, 96, 97, 98, 99, 100, 101, 102, 103, 104, 105, 106, 107, 108, 109, 110, 111, 112, 113, 114, 115, 116, 117, 577, 579, 581, 583, 585, 587, 589, 591, 593, 595, 597, 599, 601, 603, 605, 607, 609, 611, 613, 615, 617, 619, 621, 623, 625, 627, or 637, a variant, derivative, orthologue, paralogue or homologue thereof, in which: the amino acid at Mutated site 4 is Ser, and the amino acid at Mutated site 5 is His.

[1024] In another preferred embodiment, the mutated PPO comprises a sequence of SEQ ID NO: 1, 2, 3, 4, 5, 6, 7, 8, 9, 10, 11, 12, 13, 14, 15, 16, 17, 18, 19, 20, 21, 22, 23, 24, 25, 26, 27, 28, 29, 30, 31, 32, 33, 34, 35, 36, 37, 38, 39, 40, 41, 42, 43, 44, 45, 46, 47, 48, 49, 50, 51, 52, 53, 54, 55, 56, 57, 58, 59, 60, 61, 62, 63, 64, 65, 66, 67, 68, 69, 70, 71, 72, 73, 74, 75, 76, 77, 78, 79, 80, 81, 82, 83, 84, 85, 86, 87, 88, 89, 90, 91, 92, 93, 94, 95, 96, 97, 98, 99, 100, 101, 102, 103, 104, 105, 106, 107, 108, 109, 110, 111, 112, 113, 114, 115, 116, 117, 577, 579, 581, 583, 585, 587, 589, 591, 593, 595, 597, 599, 601, 603, 605, 607, 609, 611, 613, 615, 617, 619, 621, 623, 625, 627, or 637, a variant, derivative, orthologue, paralogue or homologue thereof, in which: the amino acid at Mutated site 4 is Ser, and the amino acid at Mutated site 5 is Lys.

[1025] In another preferred embodiment, the mutated PPO comprises a sequence of SEQ ID NO: 1, 2, 3, 4, 5, 6, 7, 8, 9, 10, 11, 12, 13, 14, 15, 16, 17, 18, 19, 20, 21, 22, 23, 24, 25, 26, 27, 28, 29, 30, 31, 32, 33, 34, 35, 36, 37, 38, 39, 40, 41, 42, 43, 44, 45, 46, 47, 48, 49, 50, 51, 52, 53, 54, 55, 56, 57, 58, 59, 60, 61, 62, 63, 64, 65, 66, 67, 68, 69, 70, 71, 72, 73, 74, 75, 76, 77, 78, 79, 80, 81, 82, 83, 84, 85, 86, 87, 88, 89, 90, 91, 92, 93, 94, 95, 96, 97, 98, 99, 100, 101, 102, 103, 104, 105, 106, 107, 108,109, 110, 111, 112, 113, 114, 115, 116, 117, 577, 579, 581, 583, 585, 587, 589, 591, 593, 595, 597, 599, 601, 603, 605, 607, 609, 611, 613, 615, 617, 619, 621, 623, 625, 627, or 637, a variant, derivative, orthologue, paralogue or homologue thereof, in which: the amino acid at Mutated site 4 is Ser, and the amino acid at Mutated site 5 is Asp.

[1026] In another preferred embodiment, the mutated PPO comprises a sequence of SEQ ID NO: 1, 2, 3, 4, 5, 6, 7, 8, 9, 10, 11, 12, 13, 14, 15, 16, 17, 18, 19, 20, 21, 22, 23, 24, 25, 26, 27, 28, 29, 30, 31, 32, 33, 34, 35, 36, 37, 38, 39, 40, 41, 42, 43, 44, 45, 46, 47, 48, 49, 50, 51, 52, 53, 54, 55, 56, 57, 58, 59, 60, 61, 62, 63, 64, 65, 66, 67, 68, 69, 70, 71, 72, 73, 74, 75, 76, 77, 78, 79, 80, 81, 82, 83, 84, 85, 86, 87, 88, 89, 90, 91, 92, 93, 94, 95, 96, 97, 98, 99, 100, 101, 102, 103, 104, 105, 106, 107, 108, 109, 110, 111, 112, 113, 114, 115, 116, 117, 577, 579, 581, 583, 585, 587, 589, 591, 593, 595, 597, 599, 601, 603, 605, 607, 609, 611, 613, 615, 617, 619, 621, 623, 625, 627, or 637, a variant, derivative, orthologue, paralogue or homologue thereof, in which: the amino acid at Mutated site 4 is Ser, and the amino acid at Mutated site 5 is Glu.

[1027] In another preferred embodiment, the mutated PPO comprises a sequence of SEQ ID NO: 1, 2, 3, 4, 5, 6, 7, 8, 9, 10, 11, 12, 13, 14, 15, 16, 17, 18, 19, 20, 21, 22, 23, 24, 25, 26, 27, 28, 29, 30, 31, 32, 33, 34, 35, 36, 37, 38, 39, 40, 41, 42, 43, 44, 45, 46, 47, 48, 49, 50, 51, 52, 53, 54, 55, 56, 57, 58, 59, 60, 61, 62, 63, 64, 65, 66, 67, 68, 69, 70, 71, 72, 73, 74, 75, 76, 77, 78, 79, 80, 81, 82, 83, 84, 85, 86, 87, 88, 89, 90, 91, 92, 93, 94, 95, 96, 97, 98, 99, 100, 101, 102, 103, 104, 105, 106, 107, 108, 109, 110, 111, 112, 113, 114, 115, 116, 117, 577, 579, 581, 583, 585, 587, 589, 591, 593, 595, 597, 599, 601, 603, 605, 607, 609, 611, 613, 615, 617, 619, 621, 623, 625, 627, or 637, a variant, derivative, orthologue, paralogue or homologue thereof, in which: the amino acid at Mutated site 4 is Ser, and the amino acid at Mutated site 5 is Ser.

[1028] In another preferred embodiment, the mutated PPO comprises a sequence of SEQ ID NO: 1, 2, 3, 4, 5, 6, 7, 8, 9, 10, 11, 12, 13, 14, 15, 16, 17, 18, 19, 20, 21, 22, 23, 24, 25, 26, 27, 28, 29, 30, 31, 32, 33, 34, 35, 36, 37, 38, 39, 40, 41, 42, 43, 44, 45, 46, 47, 48, 49, 50, 51, 52, 53, 54, 55, 56, 57, 58, 59, 60, 61, 62, 63, 64, 65, 66, 67, 68, 69, 70, 71, 72, 73, 74, 75, 76, 77, 78, 79, 80, 81, 82, 83, 84, 85, 86, 87, 88, 89, 90, 91, 92, 93, 94, 95, 96, 97, 98, 99, 100, 101, 102, 103, 104, 105, 106, 107, 108, 109, 110, 111, 112, 113, 114, 115, 116, 117, 577, 579, 581, 583, 585, 587, 589, 591, 593, 595, 597, 599, 601, 603, 605, 607, 609, 611, 613, 615, 617, 619, 621, 623, 625, 627, or 637, a variant, derivative, orthologue, paralogue or homologue thereof, in which: the amino acid at Mutated site 4 is Ser, and the amino acid at Mutated site 5 is Thr.

[1029] In another preferred embodiment, the mutated PPO comprises a sequence of SEQ ID NO: 1, 2, 3, 4, 5, 6, 7, 8, 9, 10, 11, 12, 13, 14, 15, 16, 17, 18, 19, 20, 21, 22, 23, 24, 25, 26, 27, 28, 29, 30, 31, 32, 33, 34, 35, 36, 37, 38, 39, 40, 41, 42, 43, 44, 45, 46, 47, 48, 49, 50, 51, 52, 53, 54, 55, 56, 57, 58, 59, 60, 61, 62, 63, 64, 65, 66, 67, 68, 69, 70, 71, 72, 73, 74, 75, 76, 77, 78, 79, 80, 81, 82, 83, 84, 85, 86, 87, 88, 89, 90, 91, 92, 93, 94, 95, 96, 97, 98, 99, 100, 101, 102, 103, 104, 105, 106, 107, 108, 109, 110, 111, 112, 113, 114, 115, 116, 117, 577, 579, 581, 583, 585, 587, 589, 591, 593, 595, 597, 599, 601, 603, 605, 607, 609, 611, 613, 615, 617, 619, 621, 623, 625, 627, or 637, a variant, derivative, orthologue, paralogue or homologue thereof, in which: the amino acid at Mutated site 4 is Ser, and the amino acid at Mutated site 5 is Asn.

[1030] In another preferred embodiment, the mutated PPO comprises a sequence of SEQ ID NO: 1, 2, 3, 4, 5, 6, 7, 8, 9, 10, 11, 12, 13, 14, 15, 16, 17, 18, 19, 20, 21, 22, 23, 24, 25, 26, 27, 28, 29, 30, 31, 32, 33, 34, 35, 36, 37, 38, 39, 40, 41, 42, 43, 44, 45, 46, 47, 48, 49, 50, 51, 52, 53, 54, 55, 56, 57, 58, 59, 60, 61, 62, 63, 64, 65, 66, 67, 68, 69, 70, 71, 72, 73, 74, 75, 76, 77, 78, 79, 80, 81, 82, 83, 84, 85, 86, 87, 88, 89, 90, 91, 92, 93, 94, 95, 96, 97, 98, 99, 100, 101, 102, 103, 104, 105, 106, 107, 108, 109, 110, 111, 112, 113, 114, 115, 116, 117, 577, 579, 581, 583, 585, 587, 589, 591, 593, 595, 597, 599, 601, 603, 605, 607, 609, 611, 613, 615, 617, 619, 621, 623, 625, 627, or 637, a variant, derivative, orthologue, paralogue or homologue thereof, in which: the amino acid at Mutated site 4 is Ser, and the amino acid at Mutated site 5 is Gln.

[1031] In another preferred embodiment, the mutated PPO comprises a sequence of SEQ ID NO: 1, 2, 3, 4, 5, 6, 7, 8, 9, 10, 11, 12, 13, 14, 15, 16, 17, 18, 19, 20, 21, 22, 23, 24, 25, 26, 27, 28, 29, 30, 31, 32, 33, 34, 35, 36, 37, 38, 39, 40, 41, 42, 43, 44, 45, 46, 47, 48, 49, 50, 51, 52, 53, 54, 55, 56, 57, 58, 59, 60, 61, 62, 63, 64, 65, 66, 67, 68, 69, 70, 71, 72, 73, 74, 75, 76, 77, 78, 79, 80, 81, 82, 83, 84, 85, 86, 87, 88, 89, 90, 91, 92, 93, 94, 95, 96, 97, 98, 99, 100, 101, 102, 103, 104, 105, 106, 107, 108, 109, 110, 111, 112, 113, 114, 115, 116, 117, 577, 579, 581, 583, 585, 587, 589, 591, 593, 595, 597, 599, 601, 603, 605, 607, 609, 611, 613, 615, 617, 619, 621, 623, 625, 627, or 637, a variant, derivative, orthologue, paralogue or homologue thereof, in which: the amino acid at Mutated site 4 is Ser, and the amino acid at Mutated site 5 is Cys.

[1032] In another preferred embodiment, the mutated PPO comprises a sequence of SEQ ID NO: 1, 2, 3, 4, 5, 6, 7, 8, 9, 10, 11, 12, 13, 14, 15, 16, 17, 18, 19, 20, 21, 22, 23, 24, 25, 26, 27, 28, 29, 30, 31, 32, 33, 34, 35, 36, 37, 38, 39, 40, 41, 42, 43, 44, 45, 46, 47, 48, 49, 50, 51, 52, 53, 54, 55, 56, 57, 58, 59, 60, 61, 62, 63, 64, 65, 66, 67, 68, 69, 70, 71, 72, 73, 74, 75, 76, 77, 78, 79, 80, 81, 82, 83, 84, 85, 86, 87, 88, 89, 90, 91, 92, 93, 94, 95, 96, 97, 98, 99, 100, 101, 102, 103, 104, 105, 106, 107, 108, 109, 110, 111, 112, 113, 114, 115, 116, 117, 577, 579, 581, 583, 585, 587, 589, 591, 593, 595, 597, 599, 601, 603, 605, 607, 609, 611, 613, 615, 617, 619, 621, 623, 625, 627, or 637, a variant, derivative, orthologue, paralogue or homologue thereof, in which: the amino acid at Mutated site 4 is Ser, and the amino acid at Mutated site 5 is Gly.

[1033] In another preferred embodiment, the mutated PPO comprises a sequence of SEQ ID NO: 1, 2, 3, 4, 5, 6, 7, 8, 9, 10, 11, 12, 13, 14, 15, 16, 17, 18, 19, 20, 21, 22, 23, 24, 25, 26, 27, 28, 29, 30, 31, 32, 33, 34, 35, 36, 37, 38, 39, 40, 41, 42, 43, 44, 45, 46, 47, 48, 49, 50, 51, 52, 53, 54, 55, 56, 57, 58, 59, 60, 61, 62, 63, 64, 65, 66, 67, 68, 69, 70, 71, 72, 73, 74, 75, 76, 77, 78, 79, 80, 81, 82, 83, 84, 85, 86, 87, 88, 89, 90, 91, 92, 93, 94, 95, 96, 97, 98, 99, 100, 101, 102, 103, 104, 105, 106, 107, 108, 109, 110, 111, 112, 113, 114, 115, 116, 117, 577, 579, 581, 583, 585, 587, 589, 591, 593, 595, 597, 599, 601, 603, 605, 607, 609, 611, 613, 615, 617, 619, 621, 623, 625, 627, or 637, a variant, derivative, orthologue, paralogue or homologue thereof, in which: the amino acid at Mutated site 4 is Ser, and the amino acid at Mutated site 5 is Pro.

[1034] In another preferred embodiment, the mutated PPO comprises a sequence of SEQ ID NO: 1, 2, 3, 4, 5, 6, 7, 8, 9, 10, 11, 12, 13, 14, 15, 16, 17, 18, 19, 20, 21, 22, 23, 24, 25, 26, 27, 28, 29, 30, 31, 32, 33, 34, 35, 36, 37, 38, 39, 40, 41, 42, 43, 44, 45, 46, 47, 48, 49, 50, 51, 52, 53, 54, 55, 56, 57, 58, 59, 60, 61, 62, 63, 64, 65, 66, 67, 68, 69, 70, 71, 72, 73, 74, 75, 76, 77, 78, 79, 80, 81, 82, 83, 84, 85, 86, 87, 88, 89, 90, 91, 92, 93, 94, 95, 96, 97, 98, 99, 100, 101, 102, 103, 104, 105, 106, 107, 108, 109, 110, 111, 112, 113, 114, 115, 116, 117, 577, 579, 581, 583, 585, 587, 589, 591, 593, 595, 597, 599, 601, 603, 605, 607, 609, 611, 613, 615, 617, 619, 621, 623, 625, 627, or 637, a variant, derivative, orthologue, paralogue or homologue thereof, in which: the amino acid at Mutated site 4 is Ser, and the amino acid at Mutated site 5 is Arg.

[1035] In another preferred embodiment, the mutated PPO comprises a sequence of SEQ ID NO: 1, 2, 3, 4, 5, 6, 7, 8, 9, 10, 11, 12, 13, 14, 15, 16, 17, 18, 19, 20, 21, 22, 23, 24, 25, 26, 27, 28, 29, 30, 31, 32, 33, 34, 35, 36, 37, 38, 39, 40, 41, 42, 43, 44, 45, 46, 47, 48, 49, 50, 51, 52, 53, 54, 55, 56, 57, 58, 59, 60, 61, 62, 63, 64, 65, 66, 67, 68, 69, 70, 71, 72, 73, 74, 75, 76, 77, 78, 79, 80, 81, 82, 83, 84, 85, 86, 87, 88, 89, 90, 91, 92, 93, 94, 95, 96, 97, 98, 99, 100, 101, 102, 103, 104, 105, 106, 107, 108, 109, 110, 111, 112, 113, 114, 115, 116, 117, 577, 579, 581, 583, 585, 587, 589, 591, 593, 595, 597, 599, 601, 603, 605, 607, 609, 611, 613, 615, 617, 619, 621, 623, 625, 627, or 637, a variant, derivative, orthologue, paralogue or homologue thereof, in which: the amino acid at Mutated site 4 is Ser, and the amino acid at Mutated site 5 is Tyr.

[1036] In another preferred embodiment, the mutated PPO comprises a sequence of SEQ ID NO: 1, 2, 3, 4, 5, 6, 7, 8, 9, 10, 11, 12, 13, 14, 15, 16, 17, 18, 19, 20, 21, 22, 23, 24, 25, 26, 27, 28, 29, 30, 31, 32, 33, 34, 35, 36, 37, 38, 39, 40, 41, 42, 43, 44, 45, 46, 47, 48, 49, 50, 51, 52, 53, 54, 55, 56, 57, 58, 59, 60, 61, 62, 63, 64, 65, 66, 67, 68, 69, 70, 71, 72, 73, 74, 75, 76, 77, 78, 79, 80, 81, 82, 83, 84, 85, 86, 87, 88, 89, 90, 91, 92, 93, 94, 95, 96, 97, 98, 99, 100, 101, 102, 103, 104, 105, 106, 107, 108, 109, 110, 111, 112, 113, 114, 115, 116, 117, 577, 579, 581, 583, 585, 587, 589, 591, 593, 595, 597, 599, 601, 603, 605, 607, 609, 611, 613, 615, 617, 619, 621, 623, 625, 627, or 637, a variant, derivative, orthologue, paralogue or homologue thereof, in which: the amino acid at Mutated site 4 is Ser, and the amino acid at Mutated site 5 is Trp.

[1037] In another preferred embodiment, the mutated PPO comprises a sequence of SEQ ID NO: 1, 2, 3, 4, 5, 6, 7, 8, 9, 10, 11, 12, 13, 14, 15, 16, 17, 18, 19, 20, 21, 22, 23, 24, 25, 26, 27, 28, 29, 30, 31, 32, 33, 34, 35, 36, 37, 38, 39, 40, 41, 42, 43, 44, 45, 46, 47, 48, 49, 50, 51, 52, 53, 54, 55, 56, 57, 58, 59, 60, 61, 62, 63, 64, 65, 66, 67, 68, 69, 70, 71, 72, 73, 74, 75, 76, 77, 78, 79, 80, 81, 82, 83, 84, 85, 86, 87, 88, 89, 90, 91, 92, 93, 94, 95, 96, 97, 98, 99, 100, 101, 102, 103, 104, 105, 106, 107, 108, 109, 110, 111, 112, 113, 114, 115, 116, 117, 577, 579, 581, 583, 585, 587, 589, 591, 593, 595, 597, 599, 601, 603, 605, 607, 609, 611, 613, 615, 617, 619, 621, 623, 625, 627, or 637, a variant, derivative, orthologue, paralogue or homologue thereof, in which: the amino acid at Mutated site 4 is Thr, and the amino acid at Mutated site 5 is Ala.

[1038] In another preferred embodiment, the mutated PPO comprises a sequence of SEQ ID NO: 1, 2, 3, 4, 5, 6, 7, 8, 9, 10, 11, 12, 13, 14, 15, 16, 17, 18, 19, 20, 21, 22, 23, 24, 25, 26, 27, 28, 29, 30, 31, 32, 33, 34, 35, 36, 37, 38, 39, 40, 41, 42, 43, 44, 45, 46, 47, 48, 49, 50, 51, 52, 53, 54, 55, 56, 57, 58, 59, 60, 61, 62, 63, 64, 65, 66, 67, 68, 69, 70, 71, 72, 73, 74, 75, 76, 77, 78, 79, 80, 81, 82, 83, 84, 85, 86, 87, 88, 89, 90, 91, 92, 93, 94, 95, 96, 97, 98, 99, 100, 101, 102, 103, 104, 105, 106, 107, 108, 109, 110, 111, 112, 113, 114, 115, 116, 117, 577, 579, 581, 583, 585, 587, 589, 591, 593, 595, 597, 599, 601, 603, 605, 607, 609, 611, 613, 615, 617, 619, 621, 623, 625, 627, or 637, a variant, derivative, orthologue, paralogue or homologue thereof, in which: the amino acid at Mutated site 4 is Thr, and the amino acid at Mutated site 5 is Leu.

[1039] In another preferred embodiment, the mutated PPO comprises a sequence of SEQ ID NO: 1, 2, 3, 4, 5, 6, 7, 8, 9, 10, 11, 12, 13, 14, 15, 16, 17, 18, 19, 20, 21, 22, 23, 24, 25, 26, 27, 28, 29, 30, 31, 32, 33, 34, 35, 36, 37, 38, 39, 40, 41, 42, 43, 44, 45, 46, 47, 48, 49, 50, 51, 52, 53, 54, 55, 56, 57, 58, 59, 60, 61, 62, 63, 64, 65, 66, 67, 68, 69, 70, 71, 72, 73, 74, 75, 76, 77, 78, 79, 80, 81, 82, 83, 84, 85, 86, 87, 88, 89, 90, 91, 92, 93, 94, 95, 96, 97, 98, 99, 100, 101, 102, 103, 104, 105, 106, 107, 108, 109, 110, 111, 112, 113, 114, 115, 116, 117, 577, 579, 581, 583, 585, 587, 589, 591, 593, 595, 597, 599, 601,603, 605, 607, 609, 611,613, 615, 617, 619, 621,623, 625, 627, or 637, a variant, derivative, orthologue, paralogue or homologue thereof, in which: the amino acid at Mutated site 4 is Thr, and the amino acid at Mutated site 5 is Val.

[1040] In another preferred embodiment, the mutated PPO comprises a sequence of SEQ ID NO: 1, 2, 3, 4, 5, 6, 7, 8, 9, 10, 11, 12, 13, 14, 15, 16, 17, 18, 19, 20, 21, 22, 23, 24, 25, 26, 27, 28, 29, 30, 31, 32, 33, 34, 35, 36, 37, 38, 39, 40, 41, 42, 43, 44, 45, 46, 47, 48, 49, 50, 51, 52, 53, 54, 55, 56, 57, 58, 59, 60, 61, 62, 63, 64, 65, 66, 67, 68, 69, 70, 71, 72, 73, 74, 75, 76, 77, 78, 79, 80, 81, 82, 83, 84, 85, 86, 87, 88, 89, 90, 91, 92, 93, 94, 95, 96, 97, 98, 99, 100, 101, 102, 103, 104, 105, 106, 107, 108, 109, 110, 111, 112, 113, 114, 115, 116, 117, 577, 579, 581, 583, 585, 587, 589, 591, 593, 595, 597, 599, 601, 603, 605, 607, 609, 611, 613, 615, 617, 619, 621, 623, 625, 627, or 637, a variant, derivative, orthologue, paralogue or homologue thereof, in which: the amino acid at Mutated site 4 is Thr, and the amino acid at Mutated site 5 is Ile.

[1041] In another preferred embodiment, the mutated PPO comprises a sequence of SEQ ID NO: 1, 2, 3, 4, 5, 6, 7, 8, 9, 10, 11, 12, 13, 14, 15, 16, 17, 18, 19, 20, 21, 22, 23, 24, 25, 26, 27, 28, 29, 30, 31, 32, 33, 34, 35, 36, 37, 38, 39, 40, 41, 42, 43, 44, 45, 46, 47, 48, 49, 50, 51, 52, 53, 54, 55, 56, 57, 58, 59, 60, 61, 62, 63, 64, 65, 66, 67, 68, 69, 70, 71, 72, 73, 74, 75, 76, 77, 78, 79, 80, 81, 82, 83, 84, 85, 86, 87, 88, 89, 90, 91, 92, 93, 94, 95, 96, 97, 98, 99, 100, 101, 102, 103, 104, 105, 106, 107, 108, 109, 110, 111, 112, 113, 114, 115, 116, 117, 577, 579, 581, 583, 585, 587, 589, 591, 593, 595, 597, 599, 601, 603, 605, 607, 609, 611, 613, 615, 617, 619, 621, 623, 625, 627, or 637, a variant, derivative, orthologue, paralogue or homologue thereof, in which: the amino acid at Mutated site 4 is Thr, and the amino acid at Mutated site 5 is Met.

[1042] In another preferred embodiment, the mutated PPO comprises a sequence of SEQ ID NO: 1, 2, 3, 4, 5, 6, 7, 8, 9, 10, 11, 12, 13, 14, 15, 16, 17, 18, 19, 20, 21, 22, 23, 24, 25, 26, 27, 28, 29, 30, 31, 32, 33, 34, 35, 36, 37, 38, 39, 40, 41, 42, 43, 44, 45, 46, 47, 48, 49, 50, 51, 52, 53, 54, 55, 56, 57, 58, 59, 60, 61, 62, 63, 64, 65, 66, 67, 68, 69, 70, 71, 72, 73, 74, 75, 76, 77, 78, 79, 80, 81, 82, 83, 84, 85, 86, 87, 88, 89, 90, 91, 92, 93, 94, 95, 96, 97, 98, 99, 100, 101, 102, 103, 104, 105, 106, 107, 108, 109, 110, 111, 112, 113, 114, 115, 116, 117, 577, 579, 581, 583, 585, 587, 589, 591, 593, 595, 597, 599, 601, 603, 605, 607, 609, 611, 613, 615, 617, 619, 621, 623, 625, 627, or 637, a variant, derivative, orthologue, paralogue or homologue thereof, in which: the amino acid at Mutated site 4 is Thr, and the amino acid at Mutated site 5 is His.

[1043] In another preferred embodiment, the mutated PPO comprises a sequence of SEQ ID NO: 1, 2, 3, 4, 5, 6, 7, 8, 9, 10, 11, 12, 13, 14, 15, 16, 17, 18, 19, 20, 21, 22, 23, 24, 25, 26, 27, 28, 29, 30, 31, 32, 33, 34, 35, 36, 37, 38, 39, 40, 41, 42, 43, 44, 45, 46, 47, 48, 49, 50, 51, 52, 53, 54, 55, 56, 57, 58, 59, 60, 61, 62, 63, 64, 65, 66, 67, 68, 69, 70, 71, 72, 73, 74, 75, 76, 77, 78, 79, 80, 81, 82, 83, 84, 85, 86, 87, 88, 89, 90, 91, 92, 93, 94, 95, 96, 97, 98, 99, 100, 101, 102, 103, 104, 105, 106, 107, 108, 109, 110, 111, 112, 113, 114, 115, 116, 117, 577, 579, 581, 583, 585, 587, 589, 591, 593, 595, 597, 599, 601,603, 605, 607, 609, 611,613, 615, 617, 619, 621,623, 625, 627, or 637, a variant, derivative, orthologue, paralogue or homologue thereof, in which: the amino acid at Mutated site 4 is Thr, and the amino acid at Mutated site 5 is Lys.

[1044] In another preferred embodiment, the mutated PPO comprises a sequence of SEQ ID NO: 1, 2, 3, 4, 5, 6, 7, 8, 9, 10, 11, 12, 13, 14, 15, 16, 17, 18, 19, 20, 21, 22, 23, 24, 25, 26, 27, 28, 29, 30, 31, 32, 33, 34, 35, 36, 37, 38, 39, 40, 41, 42, 43, 44, 45, 46, 47, 48, 49, 50, 51, 52, 53, 54, 55, 56, 57, 58, 59, 60, 61, 62, 63, 64, 65, 66, 67, 68, 69, 70, 71, 72, 73, 74, 75, 76, 77, 78, 79, 80, 81, 82, 83, 84, 85, 86, 87, 88, 89, 90, 91, 92, 93, 94, 95, 96, 97, 98, 99, 100, 101, 102, 103, 104, 105, 106, 107, 108, 109, 110, 111, 112, 113, 114, 115, 116, 117, 577, 579, 581, 583, 585, 587, 589, 591, 593, 595, 597, 599, 601, 603, 605, 607, 609, 611, 613, 615, 617, 619, 621, 623, 625, 627, or 637, a variant, derivative, orthologue, paralogue or homologue thereof, in which: the amino acid at Mutated site 4 is Thr, and the amino acid at Mutated site 5 is Asp.

[1045] In another preferred embodiment, the mutated PPO comprises a sequence of SEQ ID NO: 1, 2, 3, 4, 5, 6, 7, 8, 9, 10, 11, 12, 13, 14, 15, 16, 17, 18, 19, 20, 21, 22, 23, 24, 25, 26, 27, 28, 29, 30, 31, 32, 33, 34, 35, 36, 37, 38, 39, 40, 41, 42, 43, 44, 45, 46, 47, 48, 49, 50, 51, 52, 53, 54, 55, 56, 57, 58, 59, 60, 61, 62, 63, 64, 65, 66, 67, 68, 69, 70, 71, 72, 73, 74, 75, 76, 77, 78, 79, 80, 81, 82, 83, 84, 85, 86, 87, 88, 89, 90, 91, 92, 93, 94, 95, 96, 97, 98, 99, 100, 101, 102, 103, 104, 105, 106, 107, 108, 109, 110, 111, 112, 113, 114, 115, 116, 117, 577, 579, 581, 583, 585, 587, 589, 591, 593, 595, 597, 599, 601, 603, 605, 607, 609, 611, 613, 615, 617, 619, 621, 623, 625, 627, or 637, a variant, derivative, orthologue, paralogue or homologue thereof, in which: the amino acid at Mutated site 4 is Thr, and the amino acid at Mutated site 5 is Glu.

[1046] In another preferred embodiment, the mutated PPO comprises a sequence of SEQ ID NO: 1, 2, 3, 4, 5, 6, 7, 8, 9, 10, 11, 12, 13, 14, 15, 16, 17, 18, 19, 20, 21, 22, 23, 24, 25, 26, 27, 28, 29, 30, 31, 32, 33, 34, 35, 36, 37, 38, 39, 40, 41, 42, 43, 44, 45, 46, 47, 48, 49, 50, 51, 52, 53, 54, 55, 56, 57, 58, 59, 60, 61, 62, 63, 64, 65, 66, 67, 68, 69, 70, 71, 72, 73, 74, 75, 76, 77, 78, 79, 80, 81, 82, 83, 84, 85, 86, 87, 88, 89, 90, 91, 92, 93, 94, 95, 96, 97, 98, 99, 100, 101, 102, 103, 104, 105, 106, 107, 108, 109, 110, 111, 112, 113, 114, 115, 116, 117, 577, 579, 581, 583, 585, 587, 589, 591, 593, 595, 597, 599, 601, 603, 605, 607, 609, 611, 613, 615, 617, 619, 621, 623, 625, 627, or 637, a variant, derivative, orthologue, paralogue or homologue thereof, in which: the amino acid at Mutated site 4 is Thr, and the amino acid at Mutated site 5 is Ser.

[1047] In another preferred embodiment, the mutated PPO comprises a sequence of SEQ ID NO: 1, 2, 3, 4, 5, 6, 7, 8, 9, 10, 11, 12, 13, 14, 15, 16, 17, 18, 19, 20, 21, 22, 23, 24, 25, 26, 27, 28, 29, 30, 31, 32, 33, 34, 35, 36, 37, 38, 39, 40, 41, 42, 43, 44, 45, 46, 47, 48, 49, 50, 51, 52, 53, 54, 55, 56, 57, 58, 59, 60, 61, 62, 63, 64, 65, 66, 67, 68, 69, 70, 71, 72, 73, 74, 75, 76, 77, 78, 79, 80, 81, 82, 83, 84, 85, 86, 87, 88, 89, 90, 91, 92, 93, 94, 95, 96, 97, 98, 99, 100, 101, 102, 103, 104, 105, 106, 107, 108, 109, 110, 111, 112, 113, 114, 115, 116, 117, 577, 579, 581, 583, 585, 587, 589, 591, 593, 595, 597, 599, 601, 603, 605, 607, 609, 611, 613, 615, 617, 619, 621, 623, 625, 627, or 637, a variant, derivative, orthologue, paralogue or homologue thereof, in which: the amino acid at Mutated site 4 is Thr, and the amino acid at Mutated site 5 is Thr.

[1048] In another preferred embodiment, the mutated PPO comprises a sequence of SEQ ID NO: 1, 2, 3, 4, 5, 6, 7, 8, 9, 10, 11, 12, 13, 14, 15, 16, 17, 18, 19, 20, 21, 22, 23, 24, 25, 26, 27, 28, 29, 30, 31, 32, 33, 34, 35, 36, 37, 38, 39, 40, 41, 42, 43, 44, 45, 46, 47, 48, 49, 50, 51, 52, 53, 54, 55, 56, 57, 58, 59, 60, 61, 62, 63, 64, 65, 66, 67, 68, 69, 70, 71, 72, 73, 74, 75, 76, 77, 78, 79, 80, 81, 82, 83, 84, 85, 86, 87, 88, 89, 90, 91, 92, 93, 94, 95, 96, 97, 98, 99, 100, 101, 102, 103, 104, 105, 106, 107, 108, 109, 110, 111, 112, 113, 114, 115, 116, 117, 577, 579, 581, 583, 585, 587, 589, 591, 593, 595, 597, 599, 601, 603, 605, 607, 609, 611, 613, 615, 617, 619, 621, 623, 625, 627, or 637, a variant, derivative, orthologue, paralogue or homologue thereof, in which: the amino acid at Mutated site 4 is Thr, and the amino acid at Mutated site 5 is Asn.

[1049] In another preferred embodiment, the mutated PPO comprises a sequence of SEQ ID NO: 1, 2, 3, 4, 5, 6, 7, 8, 9, 10, 11, 12, 13, 14, 15, 16, 17, 18, 19, 20, 21, 22, 23, 24, 25, 26, 27, 28, 29, 30, 31, 32, 33, 34, 35, 36, 37, 38, 39, 40, 41, 42, 43, 44, 45, 46, 47, 48, 49, 50, 51, 52, 53, 54, 55, 56, 57, 58, 59, 60, 61, 62, 63, 64, 65, 66, 67, 68, 69, 70, 71, 72, 73, 74, 75, 76, 77, 78, 79, 80, 81, 82, 83, 84, 85, 86, 87, 88, 89, 90, 91, 92, 93, 94, 95, 96, 97, 98, 99, 100, 101, 102, 103, 104, 105, 106, 107, 108, 109, 110, 111, 112, 113, 114, 115, 116, 117, 577, 579, 581, 583, 585, 587, 589, 591, 593, 595, 597, 599, 601, 603, 605, 607, 609, 611, 613, 615, 617, 619, 621, 623, 625, 627, or 637, a variant, derivative, orthologue, paralogue or homologue thereof, in which: the amino acid at Mutated site 4 is Thr, and the amino acid at Mutated site 5 is Gln.

[1050] In another preferred embodiment, the mutated PPO comprises a sequence of SEQ ID NO: 1, 2, 3, 4, 5, 6, 7, 8, 9, 10, 11, 12, 13, 14, 15, 16, 17, 18, 19, 20, 21, 22, 23, 24, 25, 26, 27, 28, 29, 30, 31, 32, 33, 34, 35, 36, 37, 38, 39, 40, 41, 42, 43, 44, 45, 46, 47, 48, 49, 50, 51, 52, 53, 54, 55, 56, 57, 58, 59, 60, 61, 62, 63, 64, 65, 66, 67, 68, 69, 70, 71, 72, 73, 74, 75, 76, 77, 78, 79, 80, 81, 82, 83, 84, 85, 86, 87, 88, 89, 90, 91, 92, 93, 94, 95, 96, 97, 98, 99, 100, 101, 102, 103, 104, 105, 106, 107, 108, 109, 110, 111, 112, 113, 114, 115, 116, 117, 577, 579, 581, 583, 585, 587, 589, 591, 593, 595, 597, 599, 601, 603, 605, 607, 609, 611, 613, 615, 617, 619, 621, 623, 625, 627, or 637, a variant, derivative, orthologue, paralogue or homologue thereof, in which: the amino acid at Mutated site 4 is Thr, and the amino acid at Mutated site 5 is Cys.

[1051] In another preferred embodiment, the mutated PPO comprises a sequence of SEQ ID NO: 1, 2, 3, 4, 5, 6, 7, 8, 9, 10, 11, 12, 13, 14, 15, 16, 17, 18, 19, 20, 21, 22, 23, 24, 25, 26, 27, 28, 29, 30, 31, 32, 33, 34, 35, 36, 37, 38, 39, 40, 41, 42, 43, 44, 45, 46, 47, 48, 49, 50, 51, 52, 53, 54, 55, 56, 57, 58, 59, 60, 61, 62, 63, 64, 65, 66, 67, 68, 69, 70, 71, 72, 73, 74, 75, 76, 77, 78, 79, 80, 81, 82, 83, 84, 85, 86, 87, 88, 89, 90, 91, 92, 93, 94, 95, 96, 97, 98, 99, 100, 101, 102, 103, 104, 105, 106, 107, 108,109, 110, 111, 112, 113, 114, 115, 116, 117, 577, 579, 581, 583, 585, 587, 589, 591, 593, 595, 597, 599, 601, 603, 605, 607, 609, 611, 613, 615, 617, 619, 621, 623, 625, 627, or 637, a variant, derivative, orthologue, paralogue or homologue thereof, in which: the amino acid at Mutated site 4 is Thr, and the amino acid at Mutated site 5 is Gly.

[1052] In another preferred embodiment, the mutated PPO comprises a sequence of SEQ ID NO: 1, 2, 3, 4, 5, 6, 7, 8, 9, 10, 11, 12, 13, 14, 15, 16, 17, 18, 19, 20, 21, 22, 23, 24, 25, 26, 27, 28, 29, 30, 31, 32, 33, 34, 35, 36, 37, 38, 39, 40, 41, 42, 43, 44, 45, 46, 47, 48, 49, 50, 51, 52, 53, 54, 55, 56, 57, 58, 59, 60, 61, 62, 63, 64, 65, 66, 67, 68, 69, 70, 71, 72, 73, 74, 75, 76, 77, 78, 79, 80, 81, 82, 83, 84, 85, 86, 87, 88, 89, 90, 91, 92, 93, 94, 95, 96, 97, 98, 99, 100, 101, 102, 103, 104, 105, 106, 107, 108, 109, 110, 111, 112, 113, 114, 115, 116, 117, 577, 579, 581, 583, 585, 587, 589, 591, 593, 595, 597, 599, 601, 603, 605, 607, 609, 611, 613, 615, 617, 619, 621, 623, 625, 627, or 637, a variant, derivative, orthologue, paralogue or homologue thereof, in which: the amino acid at Mutated site 4 is Thr, and the amino acid at Mutated site 5 is Pro.

[1053] In another preferred embodiment, the mutated PPO comprises a sequence of SEQ ID NO: 1, 2, 3, 4, 5, 6, 7, 8, 9, 10, 11, 12, 13, 14, 15, 16, 17, 18, 19, 20, 21, 22, 23, 24, 25, 26, 27, 28, 29, 30, 31, 32, 33, 34, 35, 36, 37, 38, 39, 40, 41, 42, 43, 44, 45, 46, 47, 48, 49, 50, 51, 52, 53, 54, 55, 56, 57, 58, 59, 60, 61, 62, 63, 64, 65, 66, 67, 68, 69, 70, 71, 72, 73, 74, 75, 76, 77, 78, 79, 80, 81, 82, 83, 84, 85, 86, 87, 88, 89, 90, 91, 92, 93, 94, 95, 96, 97, 98, 99, 100, 101, 102, 103, 104, 105, 106, 107, 108, 109, 110, 111, 112, 113, 114, 115, 116, 117, 577, 579, 581, 583, 585, 587, 589, 591, 593, 595, 597, 599, 601, 603, 605, 607, 609, 611, 613, 615, 617, 619, 621, 623, 625, 627, or 637, a variant, derivative, orthologue, paralogue or homologue thereof, in which: the amino acid at Mutated site 4 is Thr, and the amino acid at Mutated site 5 is Arg.

[1054] In another preferred embodiment, the mutated PPO comprises a sequence of SEQ ID NO: 1, 2, 3, 4, 5, 6, 7, 8, 9, 10, 11, 12, 13, 14, 15, 16, 17, 18, 19, 20, 21, 22, 23, 24, 25, 26, 27, 28, 29, 30, 31, 32, 33, 34, 35, 36, 37, 38, 39, 40, 41, 42, 43, 44, 45, 46, 47, 48, 49, 50, 51, 52, 53, 54, 55, 56, 57, 58, 59, 60, 61, 62, 63, 64, 65, 66, 67, 68, 69, 70, 71, 72, 73, 74, 75, 76, 77, 78, 79, 80, 81, 82, 83, 84, 85, 86, 87, 88, 89, 90, 91, 92, 93, 94, 95, 96, 97, 98, 99, 100, 101, 102, 103, 104, 105, 106, 107, 108, 109, 110, 111, 112, 113, 114, 115, 116, 117, 577, 579, 581, 583, 585, 587, 589, 591, 593, 595, 597, 599, 601, 603, 605, 607, 609, 611, 613, 615, 617, 619, 621, 623, 625, 627, or 637, a variant, derivative, orthologue, paralogue or homologue thereof, in which: the amino acid at Mutated site 4 is Thr, and the amino acid at Mutated site 5 is Tyr.

[1055] In another preferred embodiment, the mutated PPO comprises a sequence of SEQ ID NO: 1, 2, 3, 4, 5, 6, 7, 8, 9, 10, 11, 12, 13, 14, 15, 16, 17, 18, 19, 20, 21, 22, 23, 24, 25, 26, 27, 28, 29, 30, 31, 32, 33, 34, 35, 36, 37, 38, 39, 40, 41, 42, 43, 44, 45, 46, 47, 48, 49, 50, 51, 52, 53, 54, 55, 56, 57, 58, 59, 60, 61, 62, 63, 64, 65, 66, 67, 68, 69, 70, 71, 72, 73, 74, 75, 76, 77, 78, 79, 80, 81, 82, 83, 84, 85, 86, 87, 88, 89, 90, 91, 92, 93, 94, 95, 96, 97, 98, 99, 100, 101, 102, 103, 104, 105, 106, 107, 108, 109, 110, 111, 112, 113, 114, 115, 116, 117, 577, 579, 581, 583, 585, 587, 589, 591, 593, 595, 597, 599, 601, 603, 605, 607, 609, 611, 613, 615, 617, 619, 621, 623, 625, 627, or 637, a variant, derivative, orthologue, paralogue or homologue thereof, in which: the amino acid at Mutated site 4 is Thr, and the amino acid at Mutated site 5 is Trp.

[1056] In another preferred embodiment, the mutated PPO comprises a sequence of SEQ ID NO: 1, 2, 3, 4, 5, 6, 7, 8, 9, 10, 11, 12, 13, 14, 15, 16, 17, 18, 19, 20, 21, 22, 23, 24, 25, 26, 27, 28, 29, 30, 31, 32, 33, 34, 35, 36, 37, 38, 39, 40, 41, 42, 43, 44, 45, 46, 47, 48, 49, 50, 51, 52, 53, 54, 55, 56, 57, 58, 59, 60, 61, 62, 63, 64, 65, 66, 67, 68, 69, 70, 71, 72, 73, 74, 75, 76, 77, 78, 79, 80, 81, 82, 83, 84, 85, 86, 87, 88, 89, 90, 91, 92, 93, 94, 95, 96, 97, 98, 99, 100, 101, 102, 103, 104, 105, 106, 107, 108, 109, 110, 111, 112, 113, 114, 115, 116, 117, 577, 579, 581, 583, 585, 587, 589, 591, 593, 595, 597, 599, 601, 603, 605, 607, 609, 611, 613, 615, 617, 619, 621, 623, 625, 627, or 637, a variant, derivative, orthologue, paralogue or homologue thereof, in which: the amino acid at Mutated site 4 is Asn, and the amino acid at Mutated site 5 is Ala.

[1057] In another preferred embodiment, the mutated PPO comprises a sequence of SEQ ID NO: 1, 2, 3, 4, 5, 6, 7, 8, 9, 10, 11, 12, 13, 14, 15, 16, 17, 18, 19, 20, 21, 22, 23, 24, 25, 26, 27, 28, 29, 30, 31, 32, 33, 34, 35, 36, 37, 38, 39, 40, 41, 42, 43, 44, 45, 46, 47, 48, 49, 50, 51, 52, 53, 54, 55, 56, 57, 58, 59, 60, 61, 62, 63, 64, 65, 66, 67, 68, 69, 70, 71, 72, 73, 74, 75, 76, 77, 78, 79, 80, 81, 82, 83, 84, 85, 86, 87, 88, 89, 90, 91, 92, 93, 94, 95, 96, 97, 98, 99, 100, 101, 102, 103, 104, 105, 106, 107, 108, 109, 110, 111, 112, 113, 114, 115, 116, 117, 577, 579, 581, 583, 585, 587, 589, 591, 593, 595, 597, 599, 601, 603, 605, 607, 609, 611, 613, 615, 617, 619, 621, 623, 625, 627, or 637, a variant, derivative, orthologue, paralogue or homologue thereof, in which: the amino acid at Mutated site 4 is Asn, and the amino acid at Mutated site 5 is Leu.

[1058] In another preferred embodiment, the mutated PPO comprises a sequence of SEQ ID NO: 1, 2, 3, 4, 5, 6, 7, 8, 9, 10, 11, 12, 13, 14, 15, 16, 17, 18, 19, 20, 21, 22, 23, 24, 25, 26, 27, 28, 29, 30, 31, 32, 33, 34, 35, 36, 37, 38, 39, 40, 41, 42, 43, 44, 45, 46, 47, 48, 49, 50, 51, 52, 53, 54, 55, 56, 57, 58, 59, 60, 61, 62, 63, 64, 65, 66, 67, 68, 69, 70, 71, 72, 73, 74, 75, 76, 77, 78, 79, 80, 81, 82, 83, 84, 85, 86, 87, 88, 89, 90, 91, 92, 93, 94, 95, 96, 97, 98, 99, 100, 101, 102, 103, 104, 105, 106, 107, 108, 109, 110, 111, 112, 113, 114, 115, 116, 117, 577, 579, 581, 583, 585, 587, 589, 591, 593, 595, 597, 599, 601, 603, 605, 607, 609, 611, 613, 615, 617, 619, 621, 623, 625, 627, or 637, a variant, derivative, orthologue, paralogue or homologue thereof, in which: the amino acid at Mutated site 4 is Asn, and the amino acid at Mutated site 5 is Val.

[1059] In another preferred embodiment, the mutated PPO comprises a sequence of SEQ ID NO: 1, 2, 3, 4, 5, 6, 7, 8, 9, 10, 11, 12, 13, 14, 15, 16, 17, 18, 19, 20, 21, 22, 23, 24, 25, 26, 27, 28, 29, 30, 31, 32, 33, 34, 35, 36, 37, 38, 39, 40, 41, 42, 43, 44, 45, 46, 47, 48, 49, 50, 51, 52, 53, 54, 55, 56, 57, 58, 59, 60, 61, 62, 63, 64, 65, 66, 67, 68, 69, 70, 71, 72, 73, 74, 75, 76, 77, 78, 79, 80, 81, 82, 83, 84, 85, 86, 87, 88, 89, 90, 91, 92, 93, 94, 95, 96, 97, 98, 99, 100, 101, 102, 103, 104, 105, 106, 107, 108, 109, 110, 111, 112, 113, 114, 115, 116, 117, 577, 579, 581, 583, 585, 587, 589, 591, 593, 595, 597, 599, 601, 603, 605, 607, 609, 611, 613, 615, 617, 619, 621, 623, 625, 627, or 637, a variant, derivative, orthologue, paralogue or homologue thereof, in which: the amino acid at Mutated site 4 is Asn, and the amino acid at Mutated site 5 is Ile.

[1060] In another preferred embodiment, the mutated PPO comprises a sequence of SEQ ID NO: 1, 2, 3, 4, 5, 6, 7, 8, 9, 10, 11, 12, 13, 14, 15, 16, 17, 18, 19, 20, 21, 22, 23, 24, 25, 26, 27, 28, 29, 30, 31, 32, 33, 34, 35, 36, 37, 38, 39, 40, 41, 42, 43, 44, 45, 46, 47, 48, 49, 50, 51, 52, 53, 54, 55, 56, 57, 58, 59, 60, 61, 62, 63, 64, 65, 66, 67, 68, 69, 70, 71, 72, 73, 74, 75, 76, 77, 78, 79, 80, 81, 82, 83, 84, 85, 86, 87, 88, 89, 90, 91, 92, 93, 94, 95, 96, 97, 98, 99, 100, 101, 102, 103, 104, 105, 106, 107, 108, 109, 110, 111, 112, 113, 114, 115, 116, 117, 577, 579, 581, 583, 585, 587, 589, 591, 593, 595, 597, 599, 601, 603, 605, 607, 609, 611, 613, 615, 617, 619, 621, 623, 625, 627, or 637, a variant, derivative, orthologue, paralogue or homologue thereof, in which: the amino acid at Mutated site 4 is Asn, and the amino acid at Mutated site 5 is Met.

[1061] In another preferred embodiment, the mutated PPO comprises a sequence of SEQ ID NO: 1, 2, 3, 4, 5, 6, 7, 8, 9, 10, 11, 12, 13, 14, 15, 16, 17, 18, 19, 20, 21, 22, 23, 24, 25, 26, 27, 28, 29, 30, 31, 32, 33, 34, 35, 36, 37, 38, 39, 40, 41, 42, 43, 44, 45, 46, 47, 48, 49, 50, 51, 52, 53, 54, 55, 56, 57, 58, 59, 60, 61, 62, 63, 64, 65, 66, 67, 68, 69, 70, 71, 72, 73, 74, 75, 76, 77, 78, 79, 80, 81, 82, 83, 84, 85, 86, 87, 88, 89, 90, 91, 92, 93, 94, 95, 96, 97, 98, 99, 100, 101, 102, 103, 104, 105, 106, 107, 108, 109, 110, 111, 112, 113, 114, 115, 116, 117, 577, 579, 581, 583, 585, 587, 589, 591, 593, 595, 597, 599, 601, 603, 605, 607, 609, 611, 613, 615, 617, 619, 621, 623, 625, 627, or 637, a variant, derivative, orthologue, paralogue or homologue thereof, in which: the amino acid at Mutated site 4 is Asn, and the amino acid at Mutated site 5 is His.

[1062] In another preferred embodiment, the mutated PPO comprises a sequence of SEQ ID NO: 1, 2, 3, 4, 5, 6, 7, 8, 9, 10, 11, 12, 13, 14, 15, 16, 17, 18, 19, 20, 21, 22, 23, 24, 25, 26, 27, 28, 29, 30, 31, 32, 33, 34, 35, 36, 37, 38, 39, 40, 41, 42, 43, 44, 45, 46, 47, 48, 49, 50, 51, 52, 53, 54, 55, 56, 57, 58, 59, 60, 61, 62, 63, 64, 65, 66, 67, 68, 69, 70, 71, 72, 73, 74, 75, 76, 77, 78, 79, 80, 81, 82, 83, 84, 85, 86, 87, 88, 89, 90, 91, 92, 93, 94, 95, 96, 97, 98, 99, 100, 101, 102, 103, 104, 105, 106, 107, 108, 109, 110, 111, 112, 113, 114, 115, 116, 117, 577, 579, 581, 583, 585, 587, 589, 591, 593, 595, 597, 599, 601, 603, 605, 607, 609, 611, 613, 615, 617, 619, 621, 623, 625, 627, or 637, a variant, derivative, orthologue, paralogue or homologue thereof, in which: the amino acid at Mutated site 4 is Asn, and the amino acid at Mutated site 5 is Lys.

[1063] In another preferred embodiment, the mutated PPO comprises a sequence of SEQ ID NO: 1, 2, 3, 4, 5, 6, 7, 8, 9, 10, 11, 12, 13, 14, 15, 16, 17, 18, 19, 20, 21, 22, 23, 24, 25, 26, 27, 28, 29, 30, 31, 32, 33, 34, 35, 36, 37, 38, 39, 40, 41, 42, 43, 44, 45, 46, 47, 48, 49, 50, 51, 52, 53, 54, 55, 56, 57, 58, 59, 60, 61, 62, 63, 64, 65, 66, 67, 68, 69, 70, 71, 72, 73, 74, 75, 76, 77, 78, 79, 80, 81, 82, 83, 84, 85, 86, 87, 88, 89, 90, 91, 92, 93, 94, 95, 96, 97, 98, 99, 100, 101, 102, 103, 104, 105, 106, 107, 108, 109, 110, 111, 112, 113, 114, 115, 116, 117, 577, 579, 581, 583, 585, 587, 589, 591, 593, 595, 597, 599, 601,603, 605, 607, 609, 611,613, 615, 617, 619, 621,623, 625, 627, or 637, a variant, derivative, orthologue, paralogue or homologue thereof, in which: the amino acid at Mutated site 4 is Asn, and the amino acid at Mutated site 5 is Asp.

[1064] In another preferred embodiment, the mutated PPO comprises a sequence of SEQ ID NO: 1, 2, 3, 4, 5, 6, 7, 8, 9, 10, 11, 12, 13, 14, 15, 16, 17, 18, 19, 20, 21, 22, 23, 24, 25, 26, 27, 28, 29, 30, 31, 32, 33, 34, 35, 36, 37, 38, 39, 40, 41, 42, 43, 44, 45, 46, 47, 48, 49, 50, 51, 52, 53, 54, 55, 56, 57, 58, 59, 60, 61, 62, 63, 64, 65, 66, 67, 68, 69, 70, 71, 72, 73, 74, 75, 76, 77, 78, 79, 80, 81, 82, 83, 84, 85, 86, 87, 88, 89, 90, 91, 92, 93, 94, 95, 96, 97, 98, 99, 100, 101, 102, 103, 104, 105, 106, 107, 108, 109, 110, 111, 112, 113, 114, 115, 116, 117, 577, 579, 581, 583, 585, 587, 589, 591, 593, 595, 597, 599, 601, 603, 605, 607, 609, 611, 613, 615, 617, 619, 621, 623, 625, 627, or 637, a variant, derivative, orthologue, paralogue or homologue thereof, in which: the amino acid at Mutated site 4 is Asn, and the amino acid at Mutated site 5 is Glu.

[1065] In another preferred embodiment, the mutated PPO comprises a sequence of SEQ ID NO: 1, 2, 3, 4, 5, 6, 7, 8, 9, 10, 11, 12, 13, 14, 15, 16, 17, 18, 19, 20, 21, 22, 23, 24, 25, 26, 27, 28, 29, 30, 31, 32, 33, 34, 35, 36, 37, 38, 39, 40, 41, 42, 43, 44, 45, 46, 47, 48, 49, 50, 51, 52, 53, 54, 55, 56, 57, 58, 59, 60, 61, 62, 63, 64, 65, 66, 67, 68, 69, 70, 71, 72, 73, 74, 75, 76, 77, 78, 79, 80, 81, 82, 83, 84, 85, 86, 87, 88, 89, 90, 91, 92, 93, 94, 95, 96, 97, 98, 99, 100, 101, 102, 103, 104, 105, 106, 107, 108, 109, 110, 111, 112, 113, 114, 115, 116, 117, 577, 579, 581, 583, 585, 587, 589, 591, 593, 595, 597, 599, 601, 603, 605, 607, 609, 611, 613, 615, 617, 619, 621, 623, 625, 627, or 637, a variant, derivative, orthologue, paralogue or homologue thereof, in which: the amino acid at Mutated site 4 is Asn, and the amino acid at Mutated site 5 is Ser.

[1066] In another preferred embodiment, the mutated PPO comprises a sequence of SEQ ID NO: 1, 2, 3, 4, 5, 6, 7, 8, 9, 10, 11, 12, 13, 14, 15, 16, 17, 18, 19, 20, 21, 22, 23, 24, 25, 26, 27, 28, 29, 30, 31, 32, 33, 34, 35, 36, 37, 38, 39, 40, 41, 42, 43, 44, 45, 46, 47, 48, 49, 50, 51, 52, 53, 54, 55, 56, 57, 58, 59, 60, 61, 62, 63, 64, 65, 66, 67, 68, 69, 70, 71, 72, 73, 74, 75, 76, 77, 78, 79, 80, 81, 82, 83, 84, 85, 86, 87, 88, 89, 90, 91, 92, 93, 94, 95, 96, 97, 98, 99, 100, 101, 102, 103, 104, 105, 106, 107, 108, 109, 110, 111, 112, 113, 114, 115, 116, 117, 577, 579, 581, 583, 585, 587, 589, 591, 593, 595, 597, 599, 601, 603, 605, 607, 609, 611, 613, 615, 617, 619, 621, 623, 625, 627, or 637, a variant, derivative, orthologue, paralogue or homologue thereof, in which: the amino acid at Mutated site 4 is Asn, and the amino acid at Mutated site 5 is Thr.

[1067] In another preferred embodiment, the mutated PPO comprises a sequence of SEQ ID NO: 1, 2, 3, 4, 5, 6, 7, 8, 9, 10, 11, 12, 13, 14, 15, 16, 17, 18, 19, 20, 21, 22, 23, 24, 25, 26, 27, 28, 29, 30, 31, 32, 33, 34, 35, 36, 37, 38, 39, 40, 41, 42, 43, 44, 45, 46, 47, 48, 49, 50, 51, 52, 53, 54, 55, 56, 57, 58, 59, 60, 61, 62, 63, 64, 65, 66, 67, 68, 69, 70, 71, 72, 73, 74, 75, 76, 77, 78, 79, 80, 81, 82, 83, 84, 85, 86, 87, 88, 89, 90, 91, 92, 93, 94, 95, 96, 97, 98, 99, 100, 101, 102, 103, 104, 105, 106, 107, 108, 109, 110, 111, 112, 113, 114, 115, 116, 117, 577, 579, 581, 583, 585, 587, 589, 591, 593, 595, 597, 599, 601, 603, 605, 607, 609, 611, 613, 615, 617, 619, 621, 623, 625, 627, or 637, a variant, derivative, orthologue, paralogue or homologue thereof, in which: the amino acid at Mutated site 4 is Asn, and the amino acid at Mutated site 5 is Asn.

[1068] In another preferred embodiment, the mutated PPO comprises a sequence of SEQ ID NO: 1, 2, 3, 4, 5, 6, 7, 8, 9, 10, 11, 12, 13, 14, 15, 16, 17, 18, 19, 20, 21, 22, 23, 24, 25, 26, 27, 28, 29, 30, 31, 32, 33, 34, 35, 36, 37, 38, 39, 40, 41, 42, 43, 44, 45, 46, 47, 48, 49, 50, 51, 52, 53, 54, 55, 56, 57, 58, 59, 60, 61, 62, 63, 64, 65, 66, 67, 68, 69, 70, 71, 72, 73, 74, 75, 76, 77, 78, 79, 80, 81, 82, 83, 84, 85, 86, 87, 88, 89, 90, 91, 92, 93, 94, 95, 96, 97, 98, 99, 100, 101, 102, 103, 104, 105, 106, 107, 108, 109, 110, 111, 112, 113, 114, 115, 116, 117, 577, 579, 581, 583, 585, 587, 589, 591, 593, 595, 597, 599, 601, 603, 605, 607, 609, 611, 613, 615, 617, 619, 621, 623, 625, 627, or 637, a variant, derivative, orthologue, paralogue or homologue thereof, in which: the amino acid at Mutated site 4 is Asn, and the amino acid at Mutated site 5 is Gln.

[1069] In another preferred embodiment, the mutated PPO comprises a sequence of SEQ ID NO: 1, 2, 3, 4, 5, 6, 7, 8, 9, 10, 11, 12, 13, 14, 15, 16, 17, 18, 19, 20, 21, 22, 23, 24, 25, 26, 27, 28, 29, 30, 31, 32, 33, 34, 35, 36, 37, 38, 39, 40, 41, 42, 43, 44, 45, 46, 47, 48, 49, 50, 51, 52, 53, 54, 55, 56, 57, 58, 59, 60, 61, 62, 63, 64, 65, 66, 67, 68, 69, 70, 71, 72, 73, 74, 75, 76, 77, 78, 79, 80, 81, 82, 83, 84, 85, 86, 87, 88, 89, 90, 91, 92, 93, 94, 95, 96, 97, 98, 99, 100, 101, 102, 103, 104, 105, 106, 107, 108, 109, 110, 111, 112, 113, 114, 115, 116, 117, 577, 579, 581, 583, 585, 587, 589, 591, 593, 595, 597, 599, 601, 603, 605, 607, 609, 611, 613, 615, 617, 619, 621, 623, 625, 627, or 637, a variant, derivative, orthologue, paralogue or homologue thereof, in which: the amino acid at Mutated site 4 is Asn, and the amino acid at Mutated site 5 is Cys.

[1070] In another preferred embodiment, the mutated PPO comprises a sequence of SEQ ID NO: 1, 2, 3, 4, 5, 6, 7, 8, 9, 10, 11, 12, 13, 14, 15, 16, 17, 18, 19, 20, 21, 22, 23, 24, 25, 26, 27, 28, 29, 30, 31, 32, 33, 34, 35, 36, 37, 38, 39, 40, 41, 42, 43, 44, 45, 46, 47, 48, 49, 50, 51, 52, 53, 54, 55, 56, 57, 58, 59, 60, 61, 62, 63, 64, 65, 66, 67, 68, 69, 70, 71, 72, 73, 74, 75, 76, 77, 78, 79, 80, 81, 82, 83, 84, 85, 86, 87, 88, 89, 90, 91, 92, 93, 94, 95, 96, 97, 98, 99, 100, 101, 102, 103, 104, 105, 106, 107, 108, 109, 110, 111, 112, 113, 114, 115, 116, 117, 577, 579, 581, 583, 585, 587, 589, 591, 593, 595, 597, 599, 601, 603, 605, 607, 609, 611, 613, 615, 617, 619, 621, 623, 625, 627, or 637, a variant, derivative, orthologue, paralogue or homologue thereof, in which: the amino acid at Mutated site 4 is Asn, and the amino acid at Mutated site 5 is Gly.

[1071] In another preferred embodiment, the mutated PPO comprises a sequence of SEQ ID NO: 1, 2, 3, 4, 5, 6, 7, 8, 9, 10, 11, 12, 13, 14, 15, 16, 17, 18, 19, 20, 21, 22, 23, 24, 25, 26, 27, 28, 29, 30, 31, 32, 33, 34, 35, 36, 37, 38, 39, 40, 41, 42, 43, 44, 45, 46, 47, 48, 49, 50, 51, 52, 53, 54, 55, 56, 57, 58, 59, 60, 61, 62, 63, 64, 65, 66, 67, 68, 69, 70, 71, 72, 73, 74, 75, 76, 77, 78, 79, 80, 81, 82, 83, 84, 85, 86, 87, 88, 89, 90, 91, 92, 93, 94, 95, 96, 97, 98, 99, 100, 101, 102, 103, 104, 105, 106, 107, 108, 109, 110, 111, 112, 113, 114, 115, 116, 117, 577, 579, 581, 583, 585, 587, 589, 591, 593, 595, 597, 599, 601, 603, 605, 607, 609, 611, 613, 615, 617, 619, 621, 623, 625, 627, or 637, a variant, derivative, orthologue, paralogue or homologue thereof, in which: the amino acid at Mutated site 4 is Asn, and the amino acid at Mutated site 5 is Pro.

[1072] In another preferred embodiment, the mutated PPO comprises a sequence of SEQ ID NO: 1, 2, 3, 4, 5, 6, 7, 8, 9, 10, 11, 12, 13, 14, 15, 16, 17, 18, 19, 20, 21, 22, 23, 24, 25, 26, 27, 28, 29, 30, 31, 32, 33, 34, 35, 36, 37, 38, 39, 40, 41, 42, 43, 44, 45, 46, 47, 48, 49, 50, 51, 52, 53, 54, 55, 56, 57, 58, 59, 60, 61, 62, 63, 64, 65, 66, 67, 68, 69, 70, 71, 72, 73, 74, 75, 76, 77, 78, 79, 80, 81, 82, 83, 84, 85, 86, 87, 88, 89, 90, 91, 92, 93, 94, 95, 96, 97, 98, 99, 100, 101, 102, 103, 104, 105, 106, 107, 108, 109, 110, 111, 112, 113, 114, 115, 116, 117, 577, 579, 581, 583, 585, 587, 589, 591, 593, 595, 597, 599, 601, 603, 605, 607, 609, 611, 613, 615, 617, 619, 621, 623, 625, 627, or 637, a variant, derivative, orthologue, paralogue or homologue thereof, in which: the amino acid at Mutated site 4 is Asn, and the amino acid at Mutated site 5 is Arg.

[1073] In another preferred embodiment, the mutated PPO comprises a sequence of SEQ ID NO: 1, 2, 3, 4, 5, 6, 7, 8, 9, 10, 11, 12, 13, 14, 15, 16, 17, 18, 19, 20, 21, 22, 23, 24, 25, 26, 27, 28, 29, 30, 31, 32, 33, 34, 35, 36, 37, 38, 39, 40, 41, 42, 43, 44, 45, 46, 47, 48, 49, 50, 51, 52, 53, 54, 55, 56, 57, 58, 59, 60, 61, 62, 63, 64, 65, 66, 67, 68, 69, 70, 71, 72, 73, 74, 75, 76, 77, 78, 79, 80, 81, 82, 83, 84, 85, 86, 87, 88, 89, 90, 91, 92, 93, 94, 95, 96, 97, 98, 99, 100, 101, 102, 103, 104, 105, 106, 107, 108, 109, 110, 111, 112, 113, 114, 115, 116, 117, 577, 579, 581, 583, 585, 587, 589, 591, 593, 595, 597, 599, 601, 603, 605, 607, 609, 611, 613, 615, 617, 619, 621, 623, 625, 627, or 637, a variant, derivative, orthologue, paralogue or homologue thereof, in which: the amino acid at Mutated site 4 is Asn, and the amino acid at Mutated site 5 is Tyr.

[1074] In another preferred embodiment, the mutated PPO comprises a sequence of SEQ ID NO: 1, 2, 3, 4, 5, 6, 7, 8, 9, 10, 11, 12, 13, 14, 15, 16, 17, 18, 19, 20, 21, 22, 23, 24, 25, 26, 27, 28, 29, 30, 31, 32, 33, 34, 35, 36, 37, 38, 39, 40, 41, 42, 43, 44, 45, 46, 47, 48, 49, 50, 51, 52, 53, 54, 55, 56, 57, 58, 59, 60, 61, 62, 63, 64, 65, 66, 67, 68, 69, 70, 71, 72, 73, 74, 75, 76, 77, 78, 79, 80, 81, 82, 83, 84, 85, 86, 87, 88, 89, 90, 91, 92, 93, 94, 95, 96, 97, 98, 99, 100, 101, 102, 103, 104, 105, 106, 107, 108, 109, 110, 111, 112, 113, 114, 115, 116, 117, 577, 579, 581, 583, 585, 587, 589, 591, 593, 595, 597, 599, 601, 603, 605, 607, 609, 611, 613, 615, 617, 619, 621, 623, 625, 627, or 637, a variant, derivative, orthologue, paralogue or homologue thereof, in which: the amino acid at Mutated site 4 is Asn, and the amino acid at Mutated site 5 is Trp.

[1075] In another preferred embodiment, the mutated PPO comprises a sequence of SEQ ID NO: 1, 2, 3, 4, 5, 6, 7, 8, 9, 10, 11, 12, 13, 14, 15, 16, 17, 18, 19, 20, 21, 22, 23, 24, 25, 26, 27, 28, 29, 30, 31, 32, 33, 34, 35, 36, 37, 38, 39, 40, 41, 42, 43, 44, 45, 46, 47, 48, 49, 50, 51, 52, 53, 54, 55, 56, 57, 58, 59, 60, 61, 62, 63, 64, 65, 66, 67, 68, 69, 70, 71, 72, 73, 74, 75, 76, 77, 78, 79, 80, 81, 82, 83, 84, 85, 86, 87, 88, 89, 90, 91, 92, 93, 94, 95, 96, 97, 98, 99, 100, 101, 102, 103, 104, 105, 106, 107, 108, 109, 110, 111, 112, 113, 114, 115, 116, 117, 577, 579, 581, 583, 585, 587, 589, 591, 593, 595, 597, 599, 601, 603, 605, 607, 609, 611, 613, 615, 617, 619, 621, 623, 625, 627, or 637, a variant, derivative, orthologue, paralogue or homologue thereof, in which: the amino acid at Mutated site 4 is Gln, and the amino acid at Mutated site 5 is Ala.

[1076] In another preferred embodiment, the mutated PPO comprises a sequence of SEQ ID NO: 1, 2, 3, 4, 5, 6, 7, 8, 9, 10, 11, 12, 13, 14, 15, 16, 17, 18, 19, 20, 21, 22, 23, 24, 25, 26, 27, 28, 29, 30, 31, 32, 33, 34, 35, 36, 37, 38, 39, 40, 41, 42, 43, 44, 45, 46, 47, 48, 49, 50, 51, 52, 53, 54, 55, 56, 57, 58, 59, 60, 61, 62, 63, 64, 65, 66, 67, 68, 69, 70, 71, 72, 73, 74, 75, 76, 77, 78, 79, 80, 81, 82, 83, 84, 85, 86, 87, 88, 89, 90, 91, 92, 93, 94, 95, 96, 97, 98, 99, 100, 101, 102, 103, 104, 105, 106, 107, 108, 109, 110, 111, 112, 113, 114, 115, 116, 117, 577, 579, 581, 583, 585, 587, 589, 591, 593, 595, 597, 599, 601, 603, 605, 607, 609, 611, 613, 615, 617, 619, 621, 623, 625, 627, or 637, a variant, derivative, orthologue, paralogue or homologue thereof, in which: the amino acid at Mutated site 4 is Gln, and the amino acid at Mutated site 5 is Leu.

[1077] In another preferred embodiment, the mutated PPO comprises a sequence of SEQ ID NO: 1, 2, 3, 4, 5, 6, 7, 8, 9, 10, 11, 12, 13, 14, 15, 16, 17, 18, 19, 20, 21, 22, 23, 24, 25, 26, 27, 28, 29, 30, 31, 32, 33, 34, 35, 36, 37, 38, 39, 40, 41, 42, 43, 44, 45, 46, 47, 48, 49, 50, 51, 52, 53, 54, 55, 56, 57, 58, 59, 60, 61, 62, 63, 64, 65, 66, 67, 68, 69, 70, 71, 72, 73, 74, 75, 76, 77, 78, 79, 80, 81, 82, 83, 84, 85, 86, 87, 88, 89, 90, 91, 92, 93, 94, 95, 96, 97, 98, 99, 100, 101, 102, 103, 104, 105, 106, 107, 108, 109, 110, 111, 112, 113, 114, 115, 116, 117, 577, 579, 581, 583, 585, 587, 589, 591, 593, 595, 597, 599, 601, 603, 605, 607, 609, 611, 613, 615, 617, 619, 621, 623, 625, 627, or 637, a variant, derivative, orthologue, paralogue or homologue thereof, in which: the amino acid at Mutated site 4 is Gln, and the amino acid at Mutated site 5 is Val.

[1078] In another preferred embodiment, the mutated PPO comprises a sequence of SEQ ID NO: 1, 2, 3, 4, 5, 6, 7, 8, 9, 10, 11, 12, 13, 14, 15, 16, 17, 18, 19, 20, 21, 22, 23, 24, 25, 26, 27, 28, 29, 30, 31, 32, 33, 34, 35, 36, 37, 38, 39, 40, 41, 42, 43, 44, 45, 46, 47, 48, 49, 50, 51, 52, 53, 54, 55, 56, 57, 58, 59, 60, 61, 62, 63, 64, 65, 66, 67, 68, 69, 70, 71, 72, 73, 74, 75, 76, 77, 78, 79, 80, 81, 82, 83, 84, 85, 86, 87, 88, 89, 90, 91, 92, 93, 94, 95, 96, 97, 98, 99, 100, 101, 102, 103, 104, 105, 106, 107, 108, 109, 110, 111, 112, 113, 114, 115, 116, 117, 577, 579, 581, 583, 585, 587, 589, 591, 593, 595, 597, 599, 601, 603, 605, 607, 609, 611, 613, 615, 617, 619, 621, 623, 625, 627, or 637, a variant, derivative, orthologue, paralogue or homologue thereof, in which: the amino acid at Mutated site 4 is Gln, and the amino acid at Mutated site 5 is Ile.

[1079] In another preferred embodiment, the mutated PPO comprises a sequence of SEQ ID NO: 1, 2, 3, 4, 5, 6, 7, 8, 9, 10, 11, 12, 13, 14, 15, 16, 17, 18, 19, 20, 21, 22, 23, 24, 25, 26, 27, 28, 29, 30, 31, 32, 33, 34, 35, 36, 37, 38, 39, 40, 41, 42, 43, 44, 45, 46, 47, 48, 49, 50, 51, 52, 53, 54, 55, 56, 57, 58, 59, 60, 61, 62, 63, 64, 65, 66, 67, 68, 69, 70, 71, 72, 73, 74, 75, 76, 77, 78, 79, 80, 81, 82, 83, 84, 85, 86, 87, 88, 89, 90, 91, 92, 93, 94, 95, 96, 97, 98, 99, 100, 101, 102, 103, 104, 105, 106, 107, 108, 109, 110, 111, 112, 113, 114, 115, 116, 117, 577, 579, 581, 583, 585, 587, 589, 591, 593, 595, 597, 599, 601, 603, 605, 607, 609, 611, 613, 615, 617, 619, 621, 623, 625, 627, or 637, a variant, derivative, orthologue, paralogue or homologue thereof, in which: the amino acid at Mutated site 4 is Gln, and the amino acid at Mutated site 5 is Met.

[1080] In another preferred embodiment, the mutated PPO comprises a sequence of SEQ ID NO: 1, 2, 3, 4, 5, 6, 7, 8, 9, 10, 11, 12, 13, 14, 15, 16, 17, 18, 19, 20, 21, 22, 23, 24, 25, 26, 27, 28, 29, 30, 31, 32, 33, 34, 35, 36, 37, 38, 39, 40, 41, 42, 43, 44, 45, 46, 47, 48, 49, 50, 51, 52, 53, 54, 55, 56, 57, 58, 59, 60, 61, 62, 63, 64, 65, 66, 67, 68, 69, 70, 71, 72, 73, 74, 75, 76, 77, 78, 79, 80, 81, 82, 83, 84, 85, 86, 87, 88, 89, 90, 91, 92, 93, 94, 95, 96, 97, 98, 99, 100, 101, 102, 103, 104, 105, 106, 107, 108, 109, 110, 111, 112, 113, 114, 115, 116, 117, 577, 579, 581, 583, 585, 587, 589, 591, 593, 595, 597, 599, 601, 603, 605, 607, 609, 611, 613, 615, 617, 619, 621, 623, 625, 627, or 637, a variant, derivative, orthologue, paralogue or homologue thereof, in which: the amino acid at Mutated site 4 is Gln, and the amino acid at Mutated site 5 is His.

[1081] In another preferred embodiment, the mutated PPO comprises a sequence of SEQ ID NO: 1, 2, 3, 4, 5, 6, 7, 8, 9, 10, 11, 12, 13, 14, 15, 16, 17, 18, 19, 20, 21, 22, 23, 24, 25, 26, 27, 28, 29, 30, 31, 32, 33, 34, 35, 36, 37, 38, 39, 40, 41, 42, 43, 44, 45, 46, 47, 48, 49, 50, 51, 52, 53, 54, 55, 56, 57, 58, 59, 60, 61, 62, 63, 64, 65, 66, 67, 68, 69, 70, 71, 72, 73, 74, 75, 76, 77, 78, 79, 80, 81, 82, 83, 84, 85, 86, 87, 88, 89, 90, 91, 92, 93, 94, 95, 96, 97, 98, 99, 100, 101, 102, 103, 104, 105, 106, 107, 108, 109, 110, 111, 112, 113, 114, 115, 116, 117, 577, 579, 581, 583, 585, 587, 589, 591, 593, 595, 597, 599, 601, 603, 605, 607, 609, 611, 613, 615, 617, 619, 621, 623, 625, 627, or 637, a variant, derivative, orthologue, paralogue or homologue thereof, in which: the amino acid at Mutated site 4 is Gln, and the amino acid at Mutated site 5 is Lys.

[1082] In another preferred embodiment, the mutated PPO comprises a sequence of SEQ ID NO: 1, 2, 3, 4, 5, 6, 7, 8, 9, 10, 11, 12, 13, 14, 15, 16, 17, 18, 19, 20, 21, 22, 23, 24, 25, 26, 27, 28, 29, 30, 31, 32, 33, 34, 35, 36, 37, 38, 39, 40, 41, 42, 43, 44, 45, 46, 47, 48, 49, 50, 51, 52, 53, 54, 55, 56, 57, 58, 59, 60, 61, 62, 63, 64, 65, 66, 67, 68, 69, 70, 71, 72, 73, 74, 75, 76, 77, 78, 79, 80, 81, 82, 83, 84, 85, 86, 87, 88, 89, 90, 91, 92, 93, 94, 95, 96, 97, 98, 99, 100, 101, 102, 103, 104, 105, 106, 107, 108, 109, 110, 111, 112, 113, 114, 115, 116, 117, 577, 579, 581, 583, 585, 587, 589, 591, 593, 595, 597, 599, 601, 603, 605, 607, 609, 611, 613, 615, 617, 619, 621, 623, 625, 627, or 637, a variant, derivative, orthologue, paralogue or homologue thereof, in which: the amino acid at Mutated site 4 is Gln, and the amino acid at Mutated site 5 is Asp.

[1083] In another preferred embodiment, the mutated PPO comprises a sequence of SEQ ID NO: 1, 2, 3, 4, 5, 6, 7, 8, 9, 10, 11, 12, 13, 14, 15, 16, 17, 18, 19, 20, 21, 22, 23, 24, 25, 26, 27, 28, 29, 30, 31, 32, 33, 34, 35, 36, 37, 38, 39, 40, 41, 42, 43, 44, 45, 46, 47, 48, 49, 50, 51, 52, 53, 54, 55, 56, 57, 58, 59, 60, 61, 62, 63, 64, 65, 66, 67, 68, 69, 70, 71, 72, 73, 74, 75, 76, 77, 78, 79, 80, 81, 82, 83, 84, 85, 86, 87, 88, 89, 90, 91, 92, 93, 94, 95, 96, 97, 98, 99, 100, 101, 102, 103, 104, 105, 106, 107, 108, 109, 110, 111, 112, 113, 114, 115, 116, 117, 577, 579, 581, 583, 585, 587, 589, 591, 593, 595, 597, 599, 601, 603, 605, 607, 609, 611, 613, 615, 617, 619, 621, 623, 625, 627, or 637, a variant, derivative, orthologue, paralogue or homologue thereof, in which: the amino acid at Mutated site 4 is Gln, and the amino acid at Mutated site 5 is Glu.

[1084] In another preferred embodiment, the mutated PPO comprises a sequence of SEQ ID NO: 1, 2, 3, 4, 5, 6, 7, 8, 9, 10, 11, 12, 13, 14, 15, 16, 17, 18, 19, 20, 21, 22, 23, 24, 25, 26, 27, 28, 29, 30, 31, 32, 33, 34, 35, 36, 37, 38, 39, 40, 41, 42, 43, 44, 45, 46, 47, 48, 49, 50, 51, 52, 53, 54, 55, 56, 57, 58, 59, 60, 61, 62, 63, 64, 65, 66, 67, 68, 69, 70, 71, 72, 73, 74, 75, 76, 77, 78, 79, 80, 81, 82, 83, 84, 85, 86, 87, 88, 89, 90, 91, 92, 93, 94, 95, 96, 97, 98, 99, 100, 101, 102, 103, 104, 105, 106, 107, 108, 109, 110, 111, 112, 113, 114, 115, 116, 117, 577, 579, 581, 583, 585, 587, 589, 591, 593, 595, 597, 599, 601, 603, 605, 607, 609, 611, 613, 615, 617, 619, 621, 623, 625, 627, or 637, a variant, derivative, orthologue, paralogue or homologue thereof, in which: the amino acid at Mutated site 4 is Gln, and the amino acid at Mutated site 5 is Ser.

[1085] In another preferred embodiment, the mutated PPO comprises a sequence of SEQ ID NO: 1, 2, 3, 4, 5, 6, 7, 8, 9, 10, 11, 12, 13, 14, 15, 16, 17, 18, 19, 20, 21, 22, 23, 24, 25, 26, 27, 28, 29, 30, 31, 32, 33, 34, 35, 36, 37, 38, 39, 40, 41, 42, 43, 44, 45, 46, 47, 48, 49, 50, 51, 52, 53, 54, 55, 56, 57, 58, 59, 60, 61, 62, 63, 64, 65, 66, 67, 68, 69, 70, 71, 72, 73, 74, 75, 76, 77, 78, 79, 80, 81, 82, 83, 84, 85, 86, 87, 88, 89, 90, 91, 92, 93, 94, 95, 96, 97, 98, 99, 100, 101, 102, 103, 104, 105, 106, 107, 108, 109, 110, 111, 112, 113, 114, 115, 116, 117, 577, 579, 581, 583, 585, 587, 589, 591, 593, 595, 597, 599, 601, 603, 605, 607, 609, 611, 613, 615, 617, 619, 621, 623, 625, 627, or 637, a variant, derivative, orthologue, paralogue or homologue thereof, in which: the amino acid at Mutated site 4 is Gln, and the amino acid at Mutated site 5 is Thr.

[1086] In another preferred embodiment, the mutated PPO comprises a sequence of SEQ ID NO: 1, 2, 3, 4, 5, 6, 7, 8, 9, 10, 11, 12, 13, 14, 15, 16, 17, 18, 19, 20, 21, 22, 23, 24, 25, 26, 27, 28, 29, 30, 31, 32, 33, 34, 35, 36, 37, 38, 39, 40, 41, 42, 43, 44, 45, 46, 47, 48, 49, 50, 51, 52, 53, 54, 55, 56, 57, 58, 59, 60, 61, 62, 63, 64, 65, 66, 67, 68, 69, 70, 71, 72, 73, 74, 75, 76, 77, 78, 79, 80, 81, 82, 83, 84, 85, 86, 87, 88, 89, 90, 91, 92, 93, 94, 95, 96, 97, 98, 99, 100, 101, 102, 103, 104, 105, 106, 107, 108, 109, 110, 111, 112, 113, 114, 115, 116, 117, 577, 579, 581, 583, 585, 587, 589, 591, 593, 595, 597, 599, 601, 603, 605, 607, 609, 611, 613, 615, 617, 619, 621, 623, 625, 627, or 637, a variant, derivative, orthologue, paralogue or homologue thereof, in which: the amino acid at Mutated site 4 is Gln, and the amino acid at Mutated site 5 is Asn.

[1087] In another preferred embodiment, the mutated PPO comprises a sequence of SEQ ID NO: 1, 2, 3, 4, 5, 6, 7, 8, 9, 10, 11, 12, 13, 14, 15, 16, 17, 18, 19, 20, 21, 22, 23, 24, 25, 26, 27, 28, 29, 30, 31, 32, 33, 34, 35, 36, 37, 38, 39, 40, 41, 42, 43, 44, 45, 46, 47, 48, 49, 50, 51, 52, 53, 54, 55, 56, 57, 58, 59, 60, 61, 62, 63, 64, 65, 66, 67, 68, 69, 70, 71, 72, 73, 74, 75, 76, 77, 78, 79, 80, 81, 82, 83, 84, 85, 86, 87, 88, 89, 90, 91, 92, 93, 94, 95, 96, 97, 98, 99, 100, 101, 102, 103, 104, 105, 106, 107, 108, 109, 110, 111, 112, 113, 114, 115, 116, 117, 577, 579, 581, 583, 585, 587, 589, 591, 593, 595, 597, 599, 601, 603, 605, 607, 609, 611, 613, 615, 617, 619, 621, 623, 625, 627, or 637, a variant, derivative, orthologue, paralogue or homologue thereof, in which: the amino acid at Mutated site 4 is Gln, and the amino acid at Mutated site 5 is Gln.

[1088] In another preferred embodiment, the mutated PPO comprises a sequence of SEQ ID NO: 1, 2, 3, 4, 5, 6, 7, 8, 9, 10, 11, 12, 13, 14, 15, 16, 17, 18, 19, 20, 21, 22, 23, 24, 25, 26, 27, 28, 29, 30, 31, 32, 33, 34, 35, 36, 37, 38, 39, 40, 41, 42, 43, 44, 45, 46, 47, 48, 49, 50, 51, 52, 53, 54, 55, 56, 57, 58, 59, 60, 61, 62, 63, 64, 65, 66, 67, 68, 69, 70, 71, 72, 73, 74, 75, 76, 77, 78, 79, 80, 81, 82, 83, 84, 85, 86, 87, 88, 89, 90, 91, 92, 93, 94, 95, 96, 97, 98, 99, 100, 101, 102, 103, 104, 105, 106, 107, 108, 109, 110, 111, 112, 113, 114, 115, 116, 117, 577, 579, 581, 583, 585, 587, 589, 591, 593, 595, 597, 599, 601, 603, 605, 607, 609, 611, 613, 615, 617, 619, 621, 623, 625, 627, or 637, a variant, derivative, orthologue, paralogue or homologue thereof, in which: the amino acid at Mutated site 4 is Gln, and the amino acid at Mutated site 5 is Cys.

[1089] In another preferred embodiment, the mutated PPO comprises a sequence of SEQ ID NO: 1, 2, 3, 4, 5, 6, 7, 8, 9, 10, 11, 12, 13, 14, 15, 16, 17, 18, 19, 20, 21, 22, 23, 24, 25, 26, 27, 28, 29, 30, 31, 32, 33, 34, 35, 36, 37, 38, 39, 40, 41, 42, 43, 44, 45, 46, 47, 48, 49, 50, 51, 52, 53, 54, 55, 56, 57, 58, 59, 60, 61, 62, 63, 64, 65, 66, 67, 68, 69, 70, 71, 72, 73, 74, 75, 76, 77, 78, 79, 80, 81, 82, 83, 84, 85, 86, 87, 88, 89, 90, 91, 92, 93, 94, 95, 96, 97, 98, 99, 100, 101, 102, 103, 104, 105, 106, 107, 108, 109, 110, 111, 112, 113, 114, 115, 116, 117, 577, 579, 581, 583, 585, 587, 589, 591, 593, 595, 597, 599, 601, 603, 605, 607, 609, 611, 613, 615, 617, 619, 621, 623, 625, 627, or 637, a variant, derivative, orthologue, paralogue or homologue thereof, in which: the amino acid at Mutated site 4 is Gln, and the amino acid at Mutated site 5 is Gly.

[1090] In another preferred embodiment, the mutated PPO comprises a sequence of SEQ ID NO: 1, 2, 3, 4, 5, 6, 7, 8, 9, 10, 11, 12, 13, 14, 15, 16, 17, 18, 19, 20, 21, 22, 23, 24, 25, 26, 27, 28, 29, 30, 31, 32, 33, 34, 35, 36, 37, 38, 39, 40, 41, 42, 43, 44, 45, 46, 47, 48, 49, 50, 51, 52, 53, 54, 55, 56, 57, 58, 59, 60, 61, 62, 63, 64, 65, 66, 67, 68, 69, 70, 71, 72, 73, 74, 75, 76, 77, 78, 79, 80, 81, 82, 83, 84, 85, 86, 87, 88, 89, 90, 91, 92, 93, 94, 95, 96, 97, 98, 99, 100, 101, 102, 103, 104, 105, 106, 107, 108, 109, 110, 111, 112, 113, 114, 115, 116, 117, 577, 579, 581, 583, 585, 587, 589, 591, 593, 595, 597, 599, 601, 603, 605, 607, 609, 611, 613, 615, 617, 619, 621, 623, 625, 627, or 637, a variant, derivative, orthologue, paralogue or homologue thereof, in which: the amino acid at Mutated site 4 is Gln, and the amino acid at Mutated site 5 is Pro.

[1091] In another preferred embodiment, the mutated PPO comprises a sequence of SEQ ID NO: 1, 2, 3, 4, 5, 6, 7, 8, 9, 10, 11, 12, 13, 14, 15, 16, 17, 18, 19, 20, 21, 22, 23, 24, 25, 26, 27, 28, 29, 30, 31, 32, 33, 34, 35, 36, 37, 38, 39, 40, 41, 42, 43, 44, 45, 46, 47, 48, 49, 50, 51, 52, 53, 54, 55, 56, 57, 58, 59, 60, 61, 62, 63, 64, 65, 66, 67, 68, 69, 70, 71, 72, 73, 74, 75, 76, 77, 78, 79, 80, 81, 82, 83, 84, 85, 86, 87, 88, 89, 90, 91, 92, 93, 94, 95, 96, 97, 98, 99, 100, 101, 102, 103, 104, 105, 106, 107, 108, 109, 110, 111, 112, 113, 114, 115, 116, 117, 577, 579, 581, 583, 585, 587, 589, 591, 593, 595, 597, 599, 601, 603, 605, 607, 609, 611, 613, 615, 617, 619, 621, 623, 625, 627, or 637, a variant, derivative, orthologue, paralogue or homologue thereof, in which: the amino acid at Mutated site 4 is Gln, and the amino acid at Mutated site 5 is Arg.

[1092] In another preferred embodiment, the mutated PPO comprises a sequence of SEQ ID NO: 1, 2, 3, 4, 5, 6, 7, 8, 9, 10, 11, 12, 13, 14, 15, 16, 17, 18, 19, 20, 21, 22, 23, 24, 25, 26, 27, 28, 29, 30, 31, 32, 33, 34, 35, 36, 37, 38, 39, 40, 41, 42, 43, 44, 45, 46, 47, 48, 49, 50, 51, 52, 53, 54, 55, 56, 57, 58, 59, 60, 61, 62, 63, 64, 65, 66, 67, 68, 69, 70, 71, 72, 73, 74, 75, 76, 77, 78, 79, 80, 81, 82, 83, 84, 85, 86, 87, 88, 89, 90, 91, 92, 93, 94, 95, 96, 97, 98, 99, 100, 101, 102, 103, 104, 105, 106, 107, 108, 109, 110, 111, 112, 113, 114, 115, 116, 117, 577, 579, 581, 583, 585, 587, 589, 591, 593, 595, 597, 599, 601, 603, 605, 607, 609, 611, 613, 615, 617, 619, 621, 623, 625, 627, or 637, a variant, derivative, orthologue, paralogue or homologue thereof, in which: the amino acid at Mutated site 4 is Gln, and the amino acid at Mutated site 5 is Tyr.

[1093] In another preferred embodiment, the mutated PPO comprises a sequence of SEQ ID NO: 1, 2, 3, 4, 5, 6, 7, 8, 9, 10, 11, 12, 13, 14, 15, 16, 17, 18, 19, 20, 21, 22, 23, 24, 25, 26, 27, 28, 29, 30, 31, 32, 33, 34, 35, 36, 37, 38, 39, 40, 41, 42, 43, 44, 45, 46, 47, 48, 49, 50, 51, 52, 53, 54, 55, 56, 57, 58, 59, 60, 61, 62, 63, 64, 65, 66, 67, 68, 69, 70, 71, 72, 73, 74, 75, 76, 77, 78, 79, 80, 81, 82, 83, 84, 85, 86, 87, 88, 89, 90, 91, 92, 93, 94, 95, 96, 97, 98, 99, 100, 101, 102, 103, 104, 105, 106, 107, 108, 109, 110, 111, 112, 113, 114, 115, 116, 117, 577, 579, 581, 583, 585, 587, 589, 591, 593, 595, 597, 599, 601, 603, 605, 607, 609, 611, 613, 615, 617, 619, 621, 623, 625, 627, or 637, a variant, derivative, orthologue, paralogue or homologue thereof, in which: the amino acid at Mutated site 4 is Gln, and the amino acid at Mutated site 5 is Trp.

[1094] In another preferred embodiment, the mutated PPO comprises a sequence of SEQ ID NO: 1, 2, 3, 4, 5, 6, 7, 8, 9, 10, 11, 12, 13, 14, 15, 16, 17, 18, 19, 20, 21, 22, 23, 24, 25, 26, 27, 28, 29, 30, 31, 32, 33, 34, 35, 36, 37, 38, 39, 40, 41, 42, 43, 44, 45, 46, 47, 48, 49, 50, 51, 52, 53, 54, 55, 56, 57, 58, 59, 60, 61, 62, 63, 64, 65, 66, 67, 68, 69, 70, 71, 72, 73, 74, 75, 76, 77, 78, 79, 80, 81, 82, 83, 84, 85, 86, 87, 88, 89, 90, 91, 92, 93, 94, 95, 96, 97, 98, 99, 100, 101, 102, 103, 104, 105, 106, 107, 108, 109, 110, 111, 112, 113, 114, 115, 116, 117, 577, 579, 581, 583, 585, 587, 589, 591, 593, 595, 597, 599, 601, 603, 605, 607, 609, 611, 613, 615, 617, 619, 621, 623, 625, 627, or 637, a variant, derivative, orthologue, paralogue or homologue thereof, in which: the amino acid at Mutated site 4 is Cys, and the amino acid at Mutated site 5 is Ala.

[1095] In another preferred embodiment, the mutated PPO comprises a sequence of SEQ ID NO: 1, 2, 3, 4, 5, 6, 7, 8, 9, 10, 11, 12, 13, 14, 15, 16, 17, 18, 19, 20, 21, 22, 23, 24, 25, 26, 27, 28, 29, 30, 31, 32, 33, 34, 35, 36, 37, 38, 39, 40, 41, 42, 43, 44, 45, 46, 47, 48, 49, 50, 51, 52, 53, 54, 55, 56, 57, 58, 59, 60, 61, 62, 63, 64, 65, 66, 67, 68, 69, 70, 71, 72, 73, 74, 75, 76, 77, 78, 79, 80, 81, 82, 83, 84, 85, 86, 87, 88, 89, 90, 91, 92, 93, 94, 95, 96, 97, 98, 99, 100, 101, 102, 103, 104, 105, 106, 107, 108, 109, 110, 111, 112, 113, 114, 115, 116, 117, 577, 579, 581, 583, 585, 587, 589, 591, 593, 595, 597, 599, 601, 603, 605, 607, 609, 611, 613, 615, 617, 619, 621, 623, 625, 627, or 637, a variant, derivative, orthologue, paralogue or homologue thereof, in which: the amino acid at Mutated site 4 is Cys, and the amino acid at Mutated site 5 is Leu.

[1096] In another preferred embodiment, the mutated PPO comprises a sequence of SEQ ID NO: 1, 2, 3, 4, 5, 6, 7, 8, 9, 10, 11, 12, 13, 14, 15, 16, 17, 18, 19, 20, 21, 22, 23, 24, 25, 26, 27, 28, 29, 30, 31, 32, 33, 34, 35, 36, 37, 38, 39, 40, 41, 42, 43, 44, 45, 46, 47, 48, 49, 50, 51, 52, 53, 54, 55, 56, 57, 58, 59, 60, 61, 62, 63, 64, 65, 66, 67, 68, 69, 70, 71, 72, 73, 74, 75, 76, 77, 78, 79, 80, 81, 82, 83, 84, 85, 86, 87, 88, 89, 90, 91, 92, 93, 94, 95, 96, 97, 98, 99, 100, 101, 102, 103, 104, 105, 106, 107, 108, 109, 110, 111, 112, 113, 114, 115, 116, 117, 577, 579, 581, 583, 585, 587, 589, 591, 593, 595, 597, 599, 601,603, 605, 607, 609, 611,613, 615, 617, 619, 621,623, 625, 627, or 637, a variant, derivative, orthologue, paralogue or homologue thereof, in which: the amino acid at Mutated site 4 is Cys, and the amino acid at Mutated site 5 is Val.

[1097] In another preferred embodiment, the mutated PPO comprises a sequence of SEQ ID NO: 1, 2, 3, 4, 5, 6, 7, 8, 9, 10, 11, 12, 13, 14, 15, 16, 17, 18, 19, 20, 21, 22, 23, 24, 25, 26, 27, 28, 29, 30, 31, 32, 33, 34, 35, 36, 37, 38, 39, 40, 41, 42, 43, 44, 45, 46, 47, 48, 49, 50, 51, 52, 53, 54, 55, 56, 57, 58, 59, 60, 61, 62, 63, 64, 65, 66, 67, 68, 69, 70, 71, 72, 73, 74, 75, 76, 77, 78, 79, 80, 81, 82, 83, 84, 85, 86, 87, 88, 89, 90, 91, 92, 93, 94, 95, 96, 97, 98, 99, 100, 101, 102, 103, 104, 105, 106, 107, 108, 109, 110, 111, 112, 113, 114, 115, 116, 117, 577, 579, 581, 583, 585, 587, 589, 591, 593, 595, 597, 599, 601, 603, 605, 607, 609, 611, 613, 615, 617, 619, 621, 623, 625, 627, or 637, a variant, derivative, orthologue, paralogue or homologue thereof, in which: the amino acid at Mutated site 4 is Cys, and the amino acid at Mutated site 5 is Ile.

[1098] In another preferred embodiment, the mutated PPO comprises a sequence of SEQ ID NO: 1, 2, 3, 4, 5, 6, 7, 8, 9, 10, 11, 12, 13, 14, 15, 16, 17, 18, 19, 20, 21, 22, 23, 24, 25, 26, 27, 28, 29, 30, 31, 32, 33, 34, 35, 36, 37, 38, 39, 40, 41, 42, 43, 44, 45, 46, 47, 48, 49, 50, 51, 52, 53, 54, 55, 56, 57, 58, 59, 60, 61, 62, 63, 64, 65, 66, 67, 68, 69, 70, 71, 72, 73, 74, 75, 76, 77, 78, 79, 80, 81, 82, 83, 84, 85, 86, 87, 88, 89, 90, 91, 92, 93, 94, 95, 96, 97, 98, 99, 100, 101, 102, 103, 104, 105, 106, 107, 108, 109, 110, 111, 112, 113, 114, 115, 116, 117, 577, 579, 581, 583, 585, 587, 589, 591, 593, 595, 597, 599, 601, 603, 605, 607, 609, 611, 613, 615, 617, 619, 621, 623, 625, 627, or 637, a variant, derivative, orthologue, paralogue or homologue thereof, in which: the amino acid at Mutated site 4 is Cys, and the amino acid at Mutated site 5 is Met.

[1099] In another preferred embodiment, the mutated PPO comprises a sequence of SEQ ID NO: 1, 2, 3, 4, 5, 6, 7, 8, 9, 10, 11, 12, 13, 14, 15, 16, 17, 18, 19, 20, 21, 22, 23, 24, 25, 26, 27, 28, 29, 30, 31, 32, 33, 34, 35, 36, 37, 38, 39, 40, 41, 42, 43, 44, 45, 46, 47, 48, 49, 50, 51, 52, 53, 54, 55, 56, 57, 58, 59, 60, 61, 62, 63, 64, 65, 66, 67, 68, 69, 70, 71, 72, 73, 74, 75, 76, 77, 78, 79, 80, 81, 82, 83, 84, 85, 86, 87, 88, 89, 90, 91, 92, 93, 94, 95, 96, 97, 98, 99, 100, 101, 102, 103, 104, 105, 106, 107, 108, 109, 110, 111, 112, 113, 114, 115, 116, 117, 577, 579, 581, 583, 585, 587, 589, 591, 593, 595,597, 599, 601, 603, 605, 607, 609, 611, 613, 615, 617, 619, 621, 623, 625, 627, or 637, a variant, derivative, orthologue, paralogue or homologue thereof, in which: the amino acid at Mutated site 4 is Cys, and the amino acid at Mutated site 5 is His.

[1100] In another preferred embodiment, the mutated PPO comprises a sequence of SEQ ID NO: 1, 2, 3, 4, 5, 6, 7, 8, 9, 10, 11, 12, 13, 14, 15, 16, 17, 18, 19, 20, 21, 22, 23, 24, 25, 26, 27, 28, 29, 30, 31, 32, 33, 34, 35, 36, 37, 38, 39, 40, 41, 42, 43, 44, 45, 46, 47, 48, 49, 50, 51, 52, 53, 54, 55, 56, 57, 58, 59, 60, 61, 62, 63, 64, 65, 66, 67, 68, 69, 70, 71, 72, 73, 74, 75, 76, 77, 78, 79, 80, 81, 82, 83, 84, 85, 86, 87, 88, 89, 90, 91, 92, 93, 94, 95, 96, 97, 98, 99, 100, 101, 102, 103, 104, 105, 106, 107, 108, 109, 110, 111, 112, 113, 114, 115, 116, 117, 577, 579, 581, 583, 585, 587, 589, 591, 593, 595, 597, 599, 601, 603, 605, 607, 609, 611, 613, 615, 617, 619, 621, 623, 625, 627, or 637, a variant, derivative, orthologue, paralogue or homologue thereof, in which: the amino acid at Mutated site 4 is Cys, and the amino acid at Mutated site 5 is Lys.

[1101] In another preferred embodiment, the mutated PPO comprises a sequence of SEQ ID NO: 1, 2, 3, 4, 5, 6, 7, 8, 9, 10, 11, 12, 13, 14, 15, 16, 17, 18, 19, 20, 21, 22, 23, 24, 25, 26, 27, 28, 29, 30, 31, 32, 33, 34, 35, 36, 37, 38, 39, 40, 41, 42, 43, 44, 45, 46, 47, 48, 49, 50, 51, 52, 53, 54, 55, 56, 57, 58, 59, 60, 61, 62, 63, 64, 65, 66, 67, 68, 69, 70, 71, 72, 73, 74, 75, 76, 77, 78, 79, 80, 81, 82, 83, 84, 85, 86, 87, 88, 89, 90, 91, 92, 93, 94, 95, 96, 97, 98, 99, 100, 101, 102, 103, 104, 105, 106, 107, 108, 109, 110, 111, 112, 113, 114, 115, 116, 117, 577, 579, 581, 583, 585, 587, 589, 591, 593, 595, 597, 599, 601, 603, 605, 607, 609, 611, 613, 615, 617, 619, 621, 623, 625, 627, or 637, a variant, derivative, orthologue, paralogue or homologue thereof, in which: the amino acid at Mutated site 4 is Cys, and the amino acid at Mutated site 5 is Asp.

[1102] In another preferred embodiment, the mutated PPO comprises a sequence of SEQ ID NO: 1, 2, 3, 4, 5, 6, 7, 8, 9, 10, 11, 12, 13, 14, 15, 16, 17, 18, 19, 20, 21, 22, 23, 24, 25, 26, 27, 28, 29, 30, 31, 32, 33, 34, 35, 36, 37, 38, 39, 40, 41, 42, 43, 44, 45, 46, 47, 48, 49, 50, 51, 52, 53, 54, 55, 56, 57, 58, 59, 60, 61, 62, 63, 64, 65, 66, 67, 68, 69, 70, 71, 72, 73, 74, 75, 76, 77, 78, 79, 80, 81, 82, 83, 84, 85, 86, 87, 88, 89, 90, 91, 92, 93, 94, 95, 96, 97, 98, 99, 100, 101, 102, 103, 104, 105, 106, 107, 108, 109, 110, 111, 112, 113, 114, 115, 116, 117, 577, 579, 581, 583, 585, 587, 589, 591, 593, 595, 597, 599, 601, 603, 605, 607, 609, 611, 613, 615, 617, 619, 621, 623, 625, 627, or 637, a variant, derivative, orthologue, paralogue or homologue thereof, in which: the amino acid at Mutated site 4 is Cys, and the amino acid at Mutated site 5 is Glu.

[1103] In another preferred embodiment, the mutated PPO comprises a sequence of SEQ ID NO: 1, 2, 3, 4, 5, 6, 7, 8, 9, 10, 11, 12, 13, 14, 15, 16, 17, 18, 19, 20, 21, 22, 23, 24, 25, 26, 27, 28, 29, 30, 31, 32, 33, 34, 35, 36, 37, 38, 39, 40, 41, 42, 43, 44, 45, 46, 47, 48, 49, 50, 51, 52, 53, 54, 55, 56, 57, 58, 59, 60, 61, 62, 63, 64, 65, 66, 67, 68, 69, 70, 71, 72, 73, 74, 75, 76, 77, 78, 79, 80, 81, 82, 83, 84, 85, 86, 87, 88, 89, 90, 91, 92, 93, 94, 95, 96, 97, 98, 99, 100, 101, 102, 103, 104, 105, 106, 107, 108, 109, 110, 111, 112, 113, 114, 115, 116, 117, 577, 579, 581, 583, 585, 587, 589, 591, 593, 595, 597, 599, 601, 603, 605, 607, 609, 611, 613, 615, 617, 619, 621, 623, 625, 627, or 637, a variant, derivative, orthologue, paralogue or homologue thereof, in which: the amino acid at Mutated site 4 is Cys, and the amino acid at Mutated site 5 is Ser.

[1104] In another preferred embodiment, the mutated PPO comprises a sequence of SEQ ID NO: 1, 2, 3, 4, 5, 6, 7, 8, 9, 10, 11, 12, 13, 14, 15, 16, 17, 18, 19, 20, 21, 22, 23, 24, 25, 26, 27, 28, 29, 30, 31, 32, 33, 34, 35, 36, 37, 38, 39, 40, 41, 42, 43, 44, 45, 46, 47, 48, 49, 50, 51, 52, 53, 54, 55, 56, 57, 58, 59, 60, 61, 62, 63, 64, 65, 66, 67, 68, 69, 70, 71, 72, 73, 74, 75, 76, 77, 78, 79, 80, 81, 82, 83, 84, 85, 86, 87, 88, 89, 90, 91, 92, 93, 94, 95, 96, 97, 98, 99, 100, 101, 102, 103, 104, 105, 106, 107, 108, 109, 110, 111, 112, 113, 114, 115, 116, 117, 577, 579, 581, 583, 585, 587, 589, 591, 593, 595, 597, 599, 601, 603, 605, 607, 609, 611, 613, 615, 617, 619, 621, 623, 625, 627, or 637, a variant, derivative, orthologue, paralogue or homologue thereof, in which: the amino acid at Mutated site 4 is Cys, and the amino acid at Mutated site 5 is Thr.

[1105] In another preferred embodiment, the mutated PPO comprises a sequence of SEQ ID NO: 1, 2, 3, 4, 5, 6, 7, 8, 9, 10, 11, 12, 13, 14, 15, 16, 17, 18, 19, 20, 21, 22, 23, 24, 25, 26, 27, 28, 29, 30, 31, 32, 33, 34, 35, 36, 37, 38, 39, 40, 41, 42, 43, 44, 45, 46, 47, 48, 49, 50, 51, 52, 53, 54, 55, 56, 57, 58, 59, 60, 61, 62, 63, 64, 65, 66, 67, 68, 69, 70, 71, 72, 73, 74, 75, 76, 77, 78, 79, 80, 81, 82, 83, 84, 85, 86, 87, 88, 89, 90, 91, 92, 93, 94, 95, 96, 97, 98, 99, 100, 101, 102, 103, 104, 105, 106, 107, 108, 109, 110, 111, 112, 113, 114, 115, 116, 117, 577, 579, 581, 583, 585, 587, 589, 591, 593, 595, 597, 599, 601, 603, 605, 607, 609, 611, 613, 615, 617, 619, 621, 623, 625, 627, or 637, a variant, derivative, orthologue, paralogue or homologue thereof, in which: the amino acid at Mutated site 4 is Cys, and the amino acid at Mutated site 5 is Asn.

[1106] In another preferred embodiment, the mutated PPO comprises a sequence of SEQ ID NO: 1, 2, 3, 4, 5, 6, 7, 8, 9, 10, 11, 12, 13, 14, 15, 16, 17, 18, 19, 20, 21, 22, 23, 24, 25, 26, 27, 28, 29, 30, 31, 32, 33, 34, 35, 36, 37, 38, 39, 40, 41, 42, 43, 44, 45, 46, 47, 48, 49, 50, 51, 52, 53, 54, 55, 56, 57, 58, 59, 60, 61, 62, 63, 64, 65, 66, 67, 68, 69, 70, 71, 72, 73, 74, 75, 76, 77, 78, 79, 80, 81, 82, 83, 84, 85, 86, 87, 88, 89, 90, 91, 92, 93, 94, 95, 96, 97, 98, 99, 100, 101, 102, 103, 104, 105, 106, 107, 108, 109, 110, 111, 112, 113, 114, 115, 116, 117, 577, 579, 581, 583, 585, 587, 589, 591, 593, 595, 597, 599, 601, 603, 605, 607, 609, 611, 613, 615, 617, 619, 621, 623, 625, 627, or 637, a variant, derivative, orthologue, paralogue or homologue thereof, in which: the amino acid at Mutated site 4 is Cys, and the amino acid at Mutated site 5 is Gln.

[1107] In another preferred embodiment, the mutated PPO comprises a sequence of SEQ ID NO: 1, 2, 3, 4, 5, 6, 7, 8, 9, 10, 11, 12, 13, 14, 15, 16, 17, 18, 19, 20, 21, 22, 23, 24, 25, 26, 27, 28, 29, 30, 31, 32, 33, 34, 35, 36, 37, 38, 39, 40, 41, 42, 43, 44, 45, 46, 47, 48, 49, 50, 51, 52, 53, 54, 55, 56, 57, 58, 59, 60, 61, 62, 63, 64, 65, 66, 67, 68, 69, 70, 71, 72, 73, 74, 75, 76, 77, 78, 79, 80, 81, 82, 83, 84, 85, 86, 87, 88, 89, 90, 91, 92, 93, 94, 95, 96, 97, 98, 99, 100, 101, 102, 103, 104, 105, 106, 107, 108, 109, 110, 111, 112, 113, 114, 115, 116, 117, 577, 579, 581, 583, 585, 587, 589, 591, 593, 595, 597, 599, 601, 603, 605, 607, 609, 611, 613, 615, 617, 619, 621, 623, 625, 627, or 637, a variant, derivative, orthologue, paralogue or homologue thereof, in which: the amino acid at Mutated site 4 is Cys, and the amino acid at Mutated site 5 is Cys.

[1108] In another preferred embodiment, the mutated PPO comprises a sequence of SEQ ID NO: 1, 2, 3, 4, 5, 6, 7, 8, 9, 10, 11, 12, 13, 14, 15, 16, 17, 18, 19, 20, 21, 22, 23, 24, 25, 26, 27, 28, 29, 30, 31, 32, 33, 34, 35, 36, 37, 38, 39, 40, 41, 42, 43, 44, 45, 46, 47, 48, 49, 50, 51, 52, 53, 54, 55, 56, 57, 58, 59, 60, 61, 62, 63, 64, 65, 66, 67, 68, 69, 70, 71, 72, 73, 74, 75, 76, 77, 78, 79, 80, 81, 82, 83, 84, 85, 86, 87, 88, 89, 90, 91, 92, 93, 94, 95, 96, 97, 98, 99, 100, 101, 102, 103, 104, 105, 106, 107, 108, 109, 110, 111, 112, 113, 114, 115, 116, 117, 577, 579, 581, 583, 585, 587, 589, 591, 593, 595, 597, 599, 601, 603, 605, 607, 609, 611, 613, 615, 617, 619, 621, 623, 625, 627, or 637, a variant, derivative, orthologue, paralogue or homologue thereof, in which: the amino acid at Mutated site 4 is Cys, and the amino acid at Mutated site 5 is Gly.

[1109] In another preferred embodiment, the mutated PPO comprises a sequence of SEQ ID NO: 1, 2, 3, 4, 5, 6, 7, 8, 9, 10, 11, 12, 13, 14, 15, 16, 17, 18, 19, 20, 21, 22, 23, 24, 25, 26, 27, 28, 29, 30, 31, 32, 33, 34, 35, 36, 37, 38, 39, 40, 41, 42, 43, 44, 45, 46, 47, 48, 49, 50, 51, 52, 53, 54, 55, 56, 57, 58, 59, 60, 61, 62, 63, 64, 65, 66, 67, 68, 69, 70, 71, 72, 73, 74, 75, 76, 77, 78, 79, 80, 81, 82, 83, 84, 85, 86, 87, 88, 89, 90, 91, 92, 93, 94, 95, 96, 97, 98, 99, 100, 101, 102, 103, 104, 105, 106, 107, 108, 109, 110, 111, 112, 113, 114, 115, 116, 117, 577, 579, 581, 583, 585, 587, 589, 591, 593, 595, 597, 599, 601,603, 605, 607, 609, 611,613, 615, 617, 619, 621,623, 625, 627, or 637, a variant, derivative, orthologue, paralogue or homologue thereof, in which: the amino acid at Mutated site 4 is Cys, and the amino acid at Mutated site 5 is Pro.

[1110] In another preferred embodiment, the mutated PPO comprises a sequence of SEQ ID NO: 1, 2, 3, 4, 5, 6, 7, 8, 9, 10, 11, 12, 13, 14, 15, 16, 17, 18, 19, 20, 21, 22, 23, 24, 25, 26, 27, 28, 29, 30, 31, 32, 33, 34, 35, 36, 37, 38, 39, 40, 41, 42, 43, 44, 45, 46, 47, 48, 49, 50, 51, 52, 53, 54, 55, 56, 57, 58, 59, 60, 61, 62, 63, 64, 65, 66, 67, 68, 69, 70, 71, 72, 73, 74, 75, 76, 77, 78, 79, 80, 81, 82, 83, 84, 85, 86, 87, 88, 89, 90, 91, 92, 93, 94, 95, 96, 97, 98, 99, 100, 101, 102, 103, 104, 105, 106, 107, 108, 109, 110, 111, 112, 113, 114, 115, 116, 117, 577, 579, 581, 583, 585, 587, 589, 591, 593, 595, 597, 599, 601, 603, 605, 607, 609, 611, 613, 615, 617, 619, 621, 623, 625, 627, or 637, a variant, derivative, orthologue, paralogue or homologue thereof, in which: the amino acid at Mutated site 4 is Cys, and the amino acid at Mutated site 5 is Arg.

[1111] In another preferred embodiment, the mutated PPO comprises a sequence of SEQ ID NO: 1, 2, 3, 4, 5, 6, 7, 8, 9, 10, 11, 12, 13, 14, 15, 16, 17, 18, 19, 20, 21, 22, 23, 24, 25, 26, 27, 28, 29, 30, 31, 32, 33, 34, 35, 36, 37, 38, 39, 40, 41, 42, 43, 44, 45, 46, 47, 48, 49, 50, 51, 52, 53, 54, 55, 56, 57, 58, 59, 60, 61, 62, 63, 64, 65, 66, 67, 68, 69, 70, 71, 72, 73, 74, 75, 76, 77, 78, 79, 80, 81, 82, 83, 84, 85, 86, 87, 88, 89, 90, 91, 92, 93, 94, 95, 96, 97, 98, 99, 100, 101, 102, 103, 104, 105, 106, 107, 108, 109, 110, 111, 112, 113, 114, 115, 116, 117, 577, 579, 581, 583, 585, 587, 589, 591, 593, 595, 597, 599, 601, 603, 605, 607, 609, 611, 613, 615, 617, 619, 621, 623, 625, 627, or 637, a variant, derivative, orthologue, paralogue or homologue thereof, in which: the amino acid at Mutated site 4 is Cys, and the amino acid at Mutated site 5 is Tyr.

[1112] In another preferred embodiment, the mutated PPO comprises a sequence of SEQ ID NO: 1, 2, 3, 4, 5, 6, 7, 8, 9, 10, 11, 12, 13, 14, 15, 16, 17, 18, 19, 20, 21, 22, 23, 24, 25, 26, 27, 28, 29, 30, 31, 32, 33, 34, 35, 36, 37, 38, 39, 40, 41, 42, 43, 44, 45, 46, 47, 48, 49, 50, 51, 52, 53, 54, 55, 56, 57, 58, 59, 60, 61, 62, 63, 64, 65, 66, 67, 68, 69, 70, 71, 72, 73, 74, 75, 76, 77, 78, 79, 80, 81, 82, 83, 84, 85, 86, 87, 88, 89, 90, 91, 92, 93, 94, 95, 96, 97, 98, 99, 100, 101, 102, 103, 104, 105, 106, 107, 108, 109, 110, 111, 112, 113, 114, 115, 116, 117, 577, 579, 581, 583, 585, 587, 589, 591, 593, 595, 597, 599, 601, 603, 605, 607, 609, 611, 613, 615, 617, 619, 621, 623, 625, 627, or 637, a variant, derivative, orthologue, paralogue or homologue thereof, in which: the amino acid at Mutated site 4 is Cys, and the amino acid at Mutated site 5 is Trp.

[1113] In another preferred embodiment, the mutated PPO comprises a sequence of SEQ ID NO: 1, 2, 3, 4, 5, 6, 7, 8, 9, 10, 11, 12, 13, 14, 15, 16, 17, 18, 19, 20, 21, 22, 23, 24, 25, 26, 27, 28, 29, 30, 31, 32, 33, 34, 35, 36, 37, 38, 39, 40, 41, 42, 43, 44, 45, 46, 47, 48, 49, 50, 51, 52, 53, 54, 55, 56, 57, 58, 59, 60, 61, 62, 63, 64, 65, 66, 67, 68, 69, 70, 71, 72, 73, 74, 75, 76, 77, 78, 79, 80, 81, 82, 83, 84, 85, 86, 87, 88, 89, 90, 91, 92, 93, 94, 95, 96, 97, 98, 99, 100, 101, 102, 103, 104, 105, 106, 107, 108, 109, 110, 111, 112, 113, 114, 115, 116, 117, 577, 579, 581, 583, 585, 587, 589, 591, 593, 595, 597, 599, 601, 603, 605, 607, 609, 611, 613, 615, 617, 619, 621, 623, 625, 627, or 637, a variant, derivative, orthologue, paralogue or homologue thereof, in which: the amino acid at Mutated site 4 is Gly, and the amino acid at Mutated site 5 is Ala.

[1114] In another preferred embodiment, the mutated PPO comprises a sequence of SEQ ID NO: 1, 2, 3, 4, 5, 6, 7, 8, 9, 10, 11, 12, 13, 14, 15, 16, 17, 18, 19, 20, 21, 22, 23, 24, 25, 26, 27, 28, 29, 30, 31, 32, 33, 34, 35, 36, 37, 38, 39, 40, 41, 42, 43, 44, 45, 46, 47, 48, 49, 50, 51, 52, 53, 54, 55, 56, 57, 58, 59, 60, 61, 62, 63, 64, 65, 66, 67, 68, 69, 70, 71, 72, 73, 74, 75, 76, 77, 78, 79, 80, 81, 82, 83, 84, 85, 86, 87, 88, 89, 90, 91, 92, 93, 94, 95, 96, 97, 98, 99, 100, 101, 102, 103, 104, 105, 106, 107, 108, 109, 110, 111, 112, 113, 114, 115, 116, 117, 577, 579, 581, 583, 585, 587, 589, 591, 593, 595, 597, 599, 601, 603, 605, 607, 609, 611, 613, 615, 617, 619, 621, 623, 625, 627, or 637, a variant, derivative, orthologue, paralogue or homologue thereof, in which: the amino acid at Mutated site 4 is Gly, and the amino acid at Mutated site 5 is Leu.

[1115] In another preferred embodiment, the mutated PPO comprises a sequence of SEQ ID NO: 1, 2, 3, 4, 5, 6, 7, 8, 9, 10, 11, 12, 13, 14, 15, 16, 17, 18, 19, 20, 21, 22, 23, 24, 25, 26, 27, 28, 29, 30, 31, 32, 33, 34, 35, 36, 37, 38, 39, 40, 41, 42, 43, 44, 45, 46, 47, 48, 49, 50, 51, 52, 53, 54, 55, 56, 57, 58, 59, 60, 61, 62, 63, 64, 65, 66, 67, 68, 69, 70, 71, 72, 73, 74, 75, 76, 77, 78, 79, 80, 81, 82, 83, 84, 85, 86, 87, 88, 89, 90, 91, 92, 93, 94, 95, 96, 97, 98, 99, 100, 101, 102, 103, 104, 105, 106, 107, 108, 109, 110, 111, 112, 113, 114, 115, 116, 117, 577, 579, 581, 583, 585, 587, 589, 591, 593, 595, 597, 599, 601, 603, 605, 607, 609, 611, 613, 615, 617, 619, 621, 623, 625, 627, or 637, a variant, derivative, orthologue, paralogue or homologue thereof, in which: the amino acid at Mutated site 4 is Gly, and the amino acid at Mutated site 5 is Val.

[1116] In another preferred embodiment, the mutated PPO comprises a sequence of SEQ ID NO: 1, 2, 3, 4, 5, 6, 7, 8, 9, 10, 11, 12, 13, 14, 15, 16, 17, 18, 19, 20, 21, 22, 23, 24, 25, 26, 27, 28, 29, 30, 31, 32, 33, 34, 35, 36, 37, 38, 39, 40, 41, 42, 43, 44, 45, 46, 47, 48, 49, 50, 51, 52, 53, 54, 55, 56, 57, 58, 59, 60, 61, 62, 63, 64, 65, 66, 67, 68, 69, 70, 71, 72, 73, 74, 75, 76, 77, 78, 79, 80, 81, 82, 83, 84, 85, 86, 87, 88, 89, 90, 91, 92, 93, 94, 95, 96, 97, 98, 99, 100, 101, 102, 103, 104, 105, 106, 107, 108, 109, 110, 111, 112, 113, 114, 115, 116, 117, 577, 579, 581, 583, 585, 587, 589, 591, 593, 595, 597, 599, 601, 603, 605, 607, 609, 611, 613, 615, 617, 619, 621, 623, 625, 627, or 637, a variant, derivative, orthologue, paralogue or homologue thereof, in which: the amino acid at Mutated site 4 is Gly, and the amino acid at Mutated site 5 is Ile.

[1117] In another preferred embodiment, the mutated PPO comprises a sequence of SEQ ID NO: 1, 2, 3, 4, 5, 6, 7, 8, 9, 10, 11, 12, 13, 14, 15, 16, 17, 18, 19, 20, 21, 22, 23, 24, 25, 26, 27, 28, 29, 30, 31, 32, 33, 34, 35, 36, 37, 38, 39, 40, 41, 42, 43, 44, 45, 46, 47, 48, 49, 50, 51, 52, 53, 54, 55, 56, 57, 58, 59, 60, 61, 62, 63, 64, 65, 66, 67, 68, 69, 70, 71, 72, 73, 74, 75, 76, 77, 78, 79, 80, 81, 82, 83, 84, 85, 86, 87, 88, 89, 90, 91, 92, 93, 94, 95, 96, 97, 98, 99, 100, 101, 102, 103, 104, 105, 106, 107, 108, 109, 110, 111, 112, 113, 114, 115, 116, 117, 577, 579, 581, 583, 585, 587, 589, 591, 593, 595, 597, 599, 601, 603, 605, 607, 609, 611, 613, 615, 617, 619, 621, 623, 625, 627, or 637, a variant, derivative, orthologue, paralogue or homologue thereof, in which: the amino acid at Mutated site 4 is Gly, and the amino acid at Mutated site 5 is Met.

[1118] In another preferred embodiment, the mutated PPO comprises a sequence of SEQ ID NO: 1, 2, 3, 4, 5, 6, 7, 8, 9, 10, 11, 12, 13, 14, 15, 16, 17, 18, 19, 20, 21, 22, 23, 24, 25, 26, 27, 28, 29, 30, 31, 32, 33, 34, 35, 36, 37, 38, 39, 40, 41, 42, 43, 44, 45, 46, 47, 48, 49, 50, 51, 52, 53, 54, 55, 56, 57, 58, 59, 60, 61, 62, 63, 64, 65, 66, 67, 68, 69, 70, 71, 72, 73, 74, 75, 76, 77, 78, 79, 80, 81, 82, 83, 84, 85, 86, 87, 88, 89, 90, 91, 92, 93, 94, 95, 96, 97, 98, 99, 100, 101, 102, 103, 104, 105, 106, 107, 108, 109, 110, 111, 112, 113, 114, 115, 116, 117, 577, 579, 581, 583, 585, 587, 589, 591, 593, 595, 597, 599, 601, 603, 605, 607, 609, 611, 613, 615, 617, 619, 621, 623, 625, 627, or 637, a variant, derivative, orthologue, paralogue or homologue thereof, in which: the amino acid at Mutated site 4 is Gly, and the amino acid at Mutated site 5 is His.

[1119] In another preferred embodiment, the mutated PPO comprises a sequence of SEQ ID NO: 1, 2, 3, 4, 5, 6, 7, 8, 9, 10, 11, 12, 13, 14, 15, 16, 17, 18, 19, 20, 21, 22, 23, 24, 25, 26, 27, 28, 29, 30, 31, 32, 33, 34, 35, 36, 37, 38, 39, 40, 41, 42, 43, 44, 45, 46, 47, 48, 49, 50, 51, 52, 53, 54, 55, 56, 57, 58, 59, 60, 61, 62, 63, 64, 65, 66, 67, 68, 69, 70, 71, 72, 73, 74, 75, 76, 77, 78, 79, 80, 81, 82, 83, 84, 85, 86, 87, 88, 89, 90, 91, 92, 93, 94, 95, 96, 97, 98, 99, 100, 101, 102, 103, 104, 105, 106, 107, 108, 109, 110, 111, 112, 113, 114, 115, 116, 117, 577, 579, 581, 583, 585, 587, 589, 591, 593, 595, 597, 599, 601, 603, 605, 607, 609, 611, 613, 615, 617, 619, 621, 623, 625, 627, or 637, a variant, derivative, orthologue, paralogue or homologue thereof, in which: the amino acid at Mutated site 4 is Gly, and the amino acid at Mutated site 5 is Lys.

[1120] In another preferred embodiment, the mutated PPO comprises a sequence of SEQ ID NO: 1, 2, 3, 4, 5, 6, 7, 8, 9, 10, 11, 12, 13, 14, 15, 16, 17, 18, 19, 20, 21, 22, 23, 24, 25, 26, 27, 28, 29, 30, 31, 32, 33, 34, 35, 36, 37, 38, 39, 40, 41, 42, 43, 44, 45, 46, 47, 48, 49, 50, 51, 52, 53, 54, 55, 56, 57, 58, 59, 60, 61, 62, 63, 64, 65, 66, 67, 68, 69, 70, 71, 72, 73, 74, 75, 76, 77, 78, 79, 80, 81, 82, 83, 84, 85, 86, 87, 88, 89, 90, 91, 92, 93, 94, 95, 96, 97, 98, 99, 100, 101, 102, 103, 104, 105, 106, 107, 108, 109, 110, 111, 112, 113, 114, 115, 116, 117, 577, 579, 581, 583, 585, 587, 589, 591, 593, 595, 597, 599, 601, 603, 605, 607, 609, 611, 613, 615, 617, 619, 621, 623, 625, 627, or 637, a variant, derivative, orthologue, paralogue or homologue thereof, in which: the amino acid at Mutated site 4 is Gly, and the amino acid at Mutated site 5 is Asp.

[1121] In another preferred embodiment, the mutated PPO comprises a sequence of SEQ ID NO: 1, 2, 3, 4, 5, 6, 7, 8, 9, 10, 11, 12, 13, 14, 15, 16, 17, 18, 19, 20, 21, 22, 23, 24, 25, 26, 27, 28, 29, 30, 31, 32, 33, 34, 35, 36, 37, 38, 39, 40, 41, 42, 43, 44, 45, 46, 47, 48, 49, 50, 51, 52, 53, 54, 55, 56, 57, 58, 59, 60, 61, 62, 63, 64, 65, 66, 67, 68, 69, 70, 71, 72, 73, 74, 75, 76, 77, 78, 79, 80, 81, 82, 83, 84, 85, 86, 87, 88, 89, 90, 91, 92, 93, 94, 95, 96, 97, 98, 99, 100, 101, 102, 103, 104, 105, 106, 107, 108, 109, 110, 111, 112, 113, 114, 115, 116, 117, 577, 579, 581, 583, 585, 587, 589, 591, 593, 595, 597, 599, 601, 603, 605, 607, 609, 611, 613, 615, 617, 619, 621, 623, 625, 627, or 637, a variant, derivative, orthologue, paralogue or homologue thereof, in which: the amino acid at Mutated site 4 is Gly, and the amino acid at Mutated site 5 is Glu.

[1122] In another preferred embodiment, the mutated PPO comprises a sequence of SEQ ID NO: 1, 2, 3, 4, 5, 6, 7, 8, 9, 10, 11, 12, 13, 14, 15, 16, 17, 18, 19, 20, 21, 22, 23, 24, 25, 26, 27, 28, 29, 30, 31, 32, 33, 34, 35, 36, 37, 38, 39, 40, 41, 42, 43, 44, 45, 46, 47, 48, 49, 50, 51, 52, 53, 54, 55, 56, 57, 58, 59, 60, 61, 62, 63, 64, 65, 66, 67, 68, 69, 70, 71, 72, 73, 74, 75, 76, 77, 78, 79, 80, 81, 82, 83, 84, 85, 86, 87, 88, 89, 90, 91, 92, 93, 94, 95, 96, 97, 98, 99, 100, 101, 102, 103, 104, 105, 106, 107, 108, 109, 110, 111, 112, 113, 114, 115, 116, 117, 577, 579, 581, 583, 585, 587, 589, 591, 593, 595, 597, 599, 601, 603, 605, 607, 609, 611, 613, 615, 617, 619, 621, 623, 625, 627, or 637, a variant, derivative, orthologue, paralogue or homologue thereof, in which: the amino acid at Mutated site 4 is Gly, and the amino acid at Mutated site 5 is Ser.

[1123] In another preferred embodiment, the mutated PPO comprises a sequence of SEQ ID NO: 1, 2, 3, 4, 5, 6, 7, 8, 9, 10, 11, 12, 13, 14, 15, 16, 17, 18, 19, 20, 21, 22, 23, 24, 25, 26, 27, 28, 29, 30, 31, 32, 33, 34, 35, 36, 37, 38, 39, 40, 41, 42, 43, 44, 45, 46, 47, 48, 49, 50, 51, 52, 53, 54, 55, 56, 57, 58, 59, 60, 61, 62, 63, 64, 65, 66, 67, 68, 69, 70, 71, 72, 73, 74, 75, 76, 77, 78, 79, 80, 81, 82, 83, 84, 85, 86, 87, 88, 89, 90, 91, 92, 93, 94, 95, 96, 97, 98, 99, 100, 101, 102, 103, 104, 105, 106, 107, 108, 109, 110, 111, 112, 113, 114, 115, 116, 117, 577, 579, 581, 583, 585, 587, 589, 591, 593, 595, 597, 599, 601, 603, 605, 607, 609, 611, 613, 615, 617, 619, 621, 623, 625, 627, or 637, a variant, derivative, orthologue, paralogue or homologue thereof, in which: the amino acid at Mutated site 4 is Gly, and the amino acid at Mutated site 5 is Thr.

[1124] In another preferred embodiment, the mutated PPO comprises a sequence of SEQ ID NO: 1, 2, 3, 4, 5, 6, 7, 8, 9, 10, 11, 12, 13, 14, 15, 16, 17, 18, 19, 20, 21, 22, 23, 24, 25, 26, 27, 28, 29, 30, 31, 32, 33, 34, 35, 36, 37, 38, 39, 40, 41, 42, 43, 44, 45, 46, 47, 48, 49, 50, 51, 52, 53, 54, 55, 56, 57, 58, 59, 60, 61, 62, 63, 64, 65, 66, 67, 68, 69, 70, 71, 72, 73, 74, 75, 76, 77, 78, 79, 80, 81, 82, 83, 84, 85, 86, 87, 88, 89, 90, 91, 92, 93, 94, 95, 96, 97, 98, 99, 100, 101, 102, 103, 104, 105, 106, 107, 108, 109, 110, 111, 112, 113, 114, 115, 116, 117, 577, 579, 581, 583, 585, 587, 589, 591, 593, 595, 597, 599, 601, 603, 605, 607, 609, 611, 613, 615, 617, 619, 621, 623, 625, 627, or 637, a variant, derivative, orthologue, paralogue or homologue thereof, in which: the amino acid at Mutated site 4 is Gly, and the amino acid at Mutated site 5 is Asn.

[1125] In another preferred embodiment, the mutated PPO comprises a sequence of SEQ ID NO: 1, 2, 3, 4, 5, 6, 7, 8, 9, 10, 11, 12, 13, 14, 15, 16, 17, 18, 19, 20, 21, 22, 23, 24, 25, 26, 27, 28, 29, 30, 31, 32, 33, 34, 35, 36, 37, 38, 39, 40, 41, 42, 43, 44, 45, 46, 47, 48, 49, 50, 51, 52, 53, 54, 55, 56, 57, 58, 59, 60, 61, 62, 63, 64, 65, 66, 67, 68, 69, 70, 71, 72, 73, 74, 75, 76, 77, 78, 79, 80, 81, 82, 83, 84, 85, 86, 87, 88, 89, 90, 91, 92, 93, 94, 95, 96, 97, 98, 99, 100, 101, 102, 103, 104, 105, 106, 107, 108, 109, 110, 111, 112, 113, 114, 115, 116, 117, 577, 579, 581, 583, 585, 587, 589, 591, 593, 595, 597, 599, 601, 603, 605, 607, 609, 611, 613, 615, 617, 619, 621, 623, 625, 627, or 637, a variant, derivative, orthologue, paralogue or homologue thereof, in which: the amino acid at Mutated site 4 is Gly, and the amino acid at Mutated site 5 is Gln.

[1126] In another preferred embodiment, the mutated PPO comprises a sequence of SEQ ID NO: 1, 2, 3, 4, 5, 6, 7, 8, 9, 10, 11, 12, 13, 14, 15, 16, 17, 18, 19, 20, 21, 22, 23, 24, 25, 26, 27, 28, 29, 30, 31, 32, 33, 34, 35, 36, 37, 38, 39, 40, 41, 42, 43, 44, 45, 46, 47, 48, 49, 50, 51, 52, 53, 54, 55, 56, 57, 58, 59, 60, 61, 62, 63, 64, 65, 66, 67, 68, 69, 70, 71, 72, 73, 74, 75, 76, 77, 78, 79, 80, 81, 82, 83, 84, 85, 86, 87, 88, 89, 90, 91, 92, 93, 94, 95, 96, 97, 98, 99, 100, 101, 102, 103, 104, 105, 106, 107, 108, 109, 110, 111, 112, 113, 114, 115, 116, 117, 577, 579, 581, 583, 585, 587, 589, 591, 593, 595, 597, 599, 601, 603, 605, 607, 609, 611, 613, 615, 617, 619, 621, 623, 625, 627, or 637, a variant, derivative, orthologue, paralogue or homologue thereof, in which: the amino acid at Mutated site 4 is Gly, and the amino acid at Mutated site 5 is Cys.

[1127] In another preferred embodiment, the mutated PPO comprises a sequence of SEQ ID NO: 1, 2, 3, 4, 5, 6, 7, 8, 9, 10, 11, 12, 13, 14, 15, 16, 17, 18, 19, 20, 21, 22, 23, 24, 25, 26, 27, 28, 29, 30, 31, 32, 33, 34, 35, 36, 37, 38, 39, 40, 41, 42, 43, 44, 45, 46, 47, 48, 49, 50, 51, 52, 53, 54, 55, 56, 57, 58, 59, 60, 61, 62, 63, 64, 65, 66, 67, 68, 69, 70, 71, 72, 73, 74, 75, 76, 77, 78, 79, 80, 81, 82, 83, 84, 85, 86, 87, 88, 89, 90, 91, 92, 93, 94, 95, 96, 97, 98, 99, 100, 101, 102, 103, 104, 105, 106, 107, 108, 109, 110, 111, 112, 113, 114, 115, 116, 117, 577, 579, 581, 583, 585, 587, 589, 591, 593, 595, 597, 599, 601, 603, 605, 607, 609, 611, 613, 615, 617, 619, 621, 623, 625, 627, or 637, a variant, derivative, orthologue, paralogue or homologue thereof, in which: the amino acid at Mutated site 4 is Gly, and the amino acid at Mutated site 5 is Gly.

[1128] In another preferred embodiment, the mutated PPO comprises a sequence of SEQ ID NO: 1, 2, 3, 4, 5, 6, 7, 8, 9, 10, 11, 12, 13, 14, 15, 16, 17, 18, 19, 20, 21, 22, 23, 24, 25, 26, 27, 28, 29, 30, 31, 32, 33, 34, 35, 36, 37, 38, 39, 40, 41, 42, 43, 44, 45, 46, 47, 48, 49, 50, 51, 52, 53, 54, 55, 56, 57, 58, 59, 60, 61, 62, 63, 64, 65, 66, 67, 68, 69, 70, 71, 72, 73, 74, 75, 76, 77, 78, 79, 80, 81, 82, 83, 84, 85, 86, 87, 88, 89, 90, 91, 92, 93, 94, 95, 96, 97, 98, 99, 100, 101, 102, 103, 104, 105, 106, 107, 108, 109, 110, 111, 112, 113, 114, 115, 116, 117, 577, 579, 581, 583, 585, 587, 589, 591, 593, 595, 597, 599, 601, 603, 605, 607, 609, 611, 613, 615, 617, 619, 621, 623, 625, 627, or 637, a variant, derivative, orthologue, paralogue or homologue thereof, in which: the amino acid at Mutated site 4 is Gly, and the amino acid at Mutated site 5 is Pro.

[1129] In another preferred embodiment, the mutated PPO comprises a sequence of SEQ ID NO: 1, 2, 3, 4, 5, 6, 7, 8, 9, 10, 11, 12, 13, 14, 15, 16, 17, 18, 19, 20, 21, 22, 23, 24, 25, 26, 27, 28, 29, 30, 31, 32, 33, 34, 35, 36, 37, 38, 39, 40, 41, 42, 43, 44, 45, 46, 47, 48, 49, 50, 51, 52, 53, 54, 55, 56, 57, 58, 59, 60, 61, 62, 63, 64, 65, 66, 67, 68, 69, 70, 71, 72, 73, 74, 75, 76, 77, 78, 79, 80, 81, 82, 83, 84, 85, 86, 87, 88, 89, 90, 91, 92, 93, 94, 95, 96, 97, 98, 99, 100, 101, 102, 103, 104, 105, 106, 107, 108, 109, 110, 111, 112, 113, 114, 115, 116, 117, 577, 579, 581, 583, 585, 587, 589, 591, 593, 595, 597, 599, 601,603, 605, 607, 609, 611,613, 615, 617, 619, 621,623, 625, 627, or 637, a variant, derivative, orthologue, paralogue or homologue thereof, in which: the amino acid at Mutated site 4 is Gly, and the amino acid at Mutated site 5 is Arg.

[1130] In another preferred embodiment, the mutated PPO comprises a sequence of SEQ ID NO: 1, 2, 3, 4, 5, 6, 7, 8, 9, 10, 11, 12, 13, 14, 15, 16, 17, 18, 19, 20, 21, 22, 23, 24, 25, 26, 27, 28, 29, 30, 31, 32, 33, 34, 35, 36, 37, 38, 39, 40, 41, 42, 43, 44, 45, 46, 47, 48, 49, 50, 51, 52, 53, 54, 55, 56, 57, 58, 59, 60, 61, 62, 63, 64, 65, 66, 67, 68, 69, 70, 71, 72, 73, 74, 75, 76, 77, 78, 79, 80, 81, 82, 83, 84, 85, 86, 87, 88, 89, 90, 91, 92, 93, 94, 95, 96, 97, 98, 99, 100, 101, 102, 103, 104, 105, 106, 107, 108, 109, 110, 111, 112, 113, 114, 115, 116, 117, 577, 579, 581, 583, 585, 587, 589, 591, 593, 595, 597, 599, 601, 603, 605, 607, 609, 611, 613, 615, 617, 619, 621, 623, 625, 627, or 637, a variant, derivative, orthologue, paralogue or homologue thereof, in which: the amino acid at Mutated site 4 is Gly, and the amino acid at Mutated site 5 is Tyr.

[1131] In another preferred embodiment, the mutated PPO comprises a sequence of SEQ ID NO: 1, 2, 3, 4, 5, 6, 7, 8, 9, 10, 11, 12, 13, 14, 15, 16, 17, 18, 19, 20, 21, 22, 23, 24, 25, 26, 27, 28, 29, 30, 31, 32, 33, 34, 35, 36, 37, 38, 39, 40, 41, 42, 43, 44, 45, 46, 47, 48, 49, 50, 51, 52, 53, 54, 55, 56, 57, 58, 59, 60, 61, 62, 63, 64, 65, 66, 67, 68, 69, 70, 71, 72, 73, 74, 75, 76, 77, 78, 79, 80, 81, 82, 83, 84, 85, 86, 87, 88, 89, 90, 91, 92, 93, 94, 95, 96, 97, 98, 99, 100, 101, 102, 103, 104, 105, 106, 107, 108, 109, 110, 111, 112, 113, 114, 115, 116, 117, 577, 579, 581, 583, 585, 587, 589, 591, 593, 595, 597, 599, 601, 603, 605, 607, 609, 611, 613, 615, 617, 619, 621, 623, 625, 627, or 637, a variant, derivative, orthologue, paralogue or homologue thereof, in which: the amino acid at Mutated site 4 is Gly, and the amino acid at Mutated site 5 is Trp.

[1132] In another preferred embodiment, the mutated PPO comprises a sequence of SEQ ID NO: 1, 2, 3, 4, 5, 6, 7, 8, 9, 10, 11, 12, 13, 14, 15, 16, 17, 18, 19, 20, 21, 22, 23, 24, 25, 26, 27, 28, 29, 30, 31, 32, 33, 34, 35, 36, 37, 38, 39, 40, 41, 42, 43, 44, 45, 46, 47, 48, 49, 50, 51, 52, 53, 54, 55, 56, 57, 58, 59, 60, 61, 62, 63, 64, 65, 66, 67, 68, 69, 70, 71, 72, 73, 74, 75, 76, 77, 78, 79, 80, 81, 82, 83, 84, 85, 86, 87, 88, 89, 90, 91, 92, 93, 94, 95, 96, 97, 98, 99, 100, 101, 102, 103, 104, 105, 106, 107, 108, 109, 110, 111, 112, 113, 114, 115, 116, 117, 577, 579, 581, 583, 585, 587, 589, 591, 593, 595, 597, 599, 601, 603, 605, 607, 609, 611, 613, 615, 617, 619, 621, 623, 625, 627, or 637, a variant, derivative, orthologue, paralogue or homologue thereof, in which: the amino acid at Mutated site 4 is Pro, and the amino acid at Mutated site 5 is Ala.

[1133] In another preferred embodiment, the mutated PPO comprises a sequence of SEQ ID NO: 1, 2, 3, 4, 5, 6, 7, 8, 9, 10, 11, 12, 13, 14, 15, 16, 17, 18, 19, 20, 21, 22, 23, 24, 25, 26, 27, 28, 29, 30, 31, 32, 33, 34, 35, 36, 37, 38, 39, 40, 41, 42, 43, 44, 45, 46, 47, 48, 49, 50, 51, 52, 53, 54, 55, 56, 57, 58, 59, 60, 61, 62, 63, 64, 65, 66, 67, 68, 69, 70, 71, 72, 73, 74, 75, 76, 77, 78, 79, 80, 81, 82, 83, 84, 85, 86, 87, 88, 89, 90, 91, 92, 93, 94, 95, 96, 97, 98, 99, 100, 101, 102, 103, 104, 105, 106, 107, 108, 109, 110, 111, 112, 113, 114, 115, 116, 117, 577, 579, 581, 583, 585, 587, 589, 591, 593, 595, 597, 599, 601, 603, 605, 607, 609, 611, 613, 615, 617, 619, 621, 623, 625, 627, or 637, a variant, derivative, orthologue, paralogue or homologue thereof, in which: the amino acid at Mutated site 4 is Pro, and the amino acid at Mutated site 5 is Leu.

[1134] In another preferred embodiment, the mutated PPO comprises a sequence of SEQ ID NO: 1, 2, 3, 4, 5, 6, 7, 8, 9, 10, 11, 12, 13, 14, 15, 16, 17, 18, 19, 20, 21, 22, 23, 24, 25, 26, 27, 28, 29, 30, 31, 32, 33, 34, 35, 36, 37, 38, 39, 40, 41, 42, 43, 44, 45, 46, 47, 48, 49, 50, 51, 52, 53, 54, 55, 56, 57, 58, 59, 60, 61, 62, 63, 64, 65, 66, 67, 68, 69, 70, 71, 72, 73, 74, 75, 76, 77, 78, 79, 80, 81, 82, 83, 84, 85, 86, 87, 88, 89, 90, 91, 92, 93, 94, 95, 96, 97, 98, 99, 100, 101, 102, 103, 104, 105, 106, 107, 108, 109, 110, 111, 112, 113, 114, 115, 116, 117, 577, 579, 581, 583, 585, 587, 589, 591, 593, 595, 597, 599, 601, 603, 605, 607, 609, 611, 613, 615, 617, 619, 621, 623, 625, 627, or 637, a variant, derivative, orthologue, paralogue or homologue thereof, in which: the amino acid at Mutated site 4 is Pro, and the amino acid at Mutated site 5 is Val.

[1135] In another preferred embodiment, the mutated PPO comprises a sequence of SEQ ID NO: 1, 2, 3, 4, 5, 6, 7, 8, 9, 10, 11, 12, 13, 14, 15, 16, 17, 18, 19, 20, 21, 22, 23, 24, 25, 26, 27, 28, 29, 30, 31, 32, 33, 34, 35, 36, 37, 38, 39, 40, 41, 42, 43, 44, 45, 46, 47, 48, 49, 50, 51, 52, 53, 54, 55, 56, 57, 58, 59, 60, 61, 62, 63, 64, 65, 66, 67, 68, 69, 70, 71, 72, 73, 74, 75, 76, 77, 78, 79, 80, 81, 82, 83, 84, 85, 86, 87, 88, 89, 90, 91, 92, 93, 94, 95, 96, 97, 98, 99, 100, 101, 102, 103, 104, 105, 106, 107, 108, 109, 110, 111, 112, 113, 114, 115, 116, 117, 577, 579, 581, 583, 585, 587, 589, 591, 593, 595, 597, 599, 601, 603, 605, 607, 609, 611, 613, 615, 617, 619, 621, 623, 625, 627, or 637, a variant, derivative, orthologue, paralogue or homologue thereof, in which: the amino acid at Mutated site 4 is Pro, and the amino acid at Mutated site 5 is Ile.

[1136] In another preferred embodiment, the mutated PPO comprises a sequence of SEQ ID NO: 1, 2, 3, 4, 5, 6, 7, 8, 9, 10, 11, 12, 13, 14, 15, 16, 17, 18, 19, 20, 21, 22, 23, 24, 25, 26, 27, 28, 29, 30, 31, 32, 33, 34, 35, 36, 37, 38, 39, 40, 41, 42, 43, 44, 45, 46, 47, 48, 49, 50, 51, 52, 53, 54, 55, 56, 57, 58, 59, 60, 61, 62, 63, 64, 65, 66, 67, 68, 69, 70, 71, 72, 73, 74, 75, 76, 77, 78, 79, 80, 81, 82, 83, 84, 85, 86, 87, 88, 89, 90, 91, 92, 93, 94, 95, 96, 97, 98, 99, 100, 101, 102, 103, 104, 105, 106, 107, 108, 109, 110, 111, 112, 113, 114, 115, 116, 117, 577, 579, 581, 583, 585, 587, 589, 591, 593, 595, 597, 599, 601, 603, 605, 607, 609, 611, 613, 615, 617, 619, 621, 623, 625, 627, or 637, a variant, derivative, orthologue, paralogue or homologue thereof, in which: the amino acid at Mutated site 4 is Pro, and the amino acid at Mutated site 5 is Met.

[1137] In another preferred embodiment, the mutated PPO comprises a sequence of SEQ ID NO: 1, 2, 3, 4, 5, 6, 7, 8, 9, 10, 11, 12, 13, 14, 15, 16, 17, 18, 19, 20, 21, 22, 23, 24, 25, 26, 27, 28, 29, 30, 31, 32, 33, 34, 35, 36, 37, 38, 39, 40, 41, 42, 43, 44, 45, 46, 47, 48, 49, 50, 51, 52, 53, 54, 55, 56, 57, 58, 59, 60, 61, 62, 63, 64, 65, 66, 67, 68, 69, 70, 71, 72, 73, 74, 75, 76, 77, 78, 79, 80, 81, 82, 83, 84, 85, 86, 87, 88, 89, 90, 91, 92, 93, 94, 95, 96, 97, 98, 99, 100, 101, 102, 103, 104, 105, 106, 107, 108, 109, 110, 111, 112, 113, 114, 115, 116, 117, 577, 579, 581, 583, 585, 587, 589, 591, 593, 595, 597, 599, 601, 603, 605, 607, 609, 611, 613, 615, 617, 619, 621, 623, 625, 627, or 637, a variant, derivative, orthologue, paralogue or homologue thereof, in which: the amino acid at Mutated site 4 is Pro, and the amino acid at Mutated site 5 is His.

[1138] In another preferred embodiment, the mutated PPO comprises a sequence of SEQ ID NO: 1, 2, 3, 4, 5, 6, 7, 8, 9, 10, 11, 12, 13, 14, 15, 16, 17, 18, 19, 20, 21, 22, 23, 24, 25, 26, 27, 28, 29, 30, 31, 32, 33, 34, 35, 36, 37, 38, 39, 40, 41, 42, 43, 44, 45, 46, 47, 48, 49, 50, 51, 52, 53, 54, 55, 56, 57, 58, 59, 60, 61, 62, 63, 64, 65, 66, 67, 68, 69, 70, 71, 72, 73, 74, 75, 76, 77, 78, 79, 80, 81, 82, 83, 84, 85, 86, 87, 88, 89, 90, 91, 92, 93, 94, 95, 96, 97, 98, 99, 100, 101, 102, 103, 104, 105, 106, 107, 108,109, 110, 111, 112, 113, 114, 115, 116, 117, 577, 579, 581, 583, 585, 587, 589, 591, 593, 595, 597, 599, 601, 603, 605, 607, 609, 611, 613, 615, 617, 619, 621, 623, 625, 627, or 637, a variant, derivative, orthologue, paralogue or homologue thereof, in which: the amino acid at Mutated site 4 is Pro, and the amino acid at Mutated site 5 is Lys.

[1139] In another preferred embodiment, the mutated PPO comprises a sequence of SEQ ID NO: 1, 2, 3, 4, 5, 6, 7, 8, 9, 10, 11, 12, 13, 14, 15, 16, 17, 18, 19, 20, 21, 22, 23, 24, 25, 26, 27, 28, 29, 30, 31, 32, 33, 34, 35, 36, 37, 38, 39, 40, 41, 42, 43, 44, 45, 46, 47, 48, 49, 50, 51, 52, 53, 54, 55, 56, 57, 58, 59, 60, 61, 62, 63, 64, 65, 66, 67, 68, 69, 70, 71, 72, 73, 74, 75, 76, 77, 78, 79, 80, 81, 82, 83, 84, 85, 86, 87, 88, 89, 90, 91, 92, 93, 94, 95, 96, 97, 98, 99, 100, 101, 102, 103, 104, 105, 106, 107, 108, 109, 110, 111, 112, 113, 114, 115, 116, 117, 577, 579, 581, 583, 585, 587, 589, 591, 593, 595, 597, 599, 601, 603, 605, 607, 609, 611, 613, 615, 617, 619, 621, 623, 625, 627, or 637, a variant, derivative, orthologue, paralogue or homologue thereof, in which: the amino acid at Mutated site 4 is Pro, and the amino acid at Mutated site 5 is Asp.

[1140] In another preferred embodiment, the mutated PPO comprises a sequence of SEQ ID NO: 1, 2, 3, 4, 5, 6, 7, 8, 9, 10, 11, 12, 13, 14, 15, 16, 17, 18, 19, 20, 21, 22, 23, 24, 25, 26, 27, 28, 29, 30, 31, 32, 33, 34, 35, 36, 37, 38, 39, 40, 41, 42, 43, 44, 45, 46, 47, 48, 49, 50, 51, 52, 53, 54, 55, 56, 57, 58, 59, 60, 61, 62, 63, 64, 65, 66, 67, 68, 69, 70, 71, 72, 73, 74, 75, 76, 77, 78, 79, 80, 81, 82, 83, 84, 85, 86, 87, 88, 89, 90, 91, 92, 93, 94, 95, 96, 97, 98, 99, 100, 101, 102, 103, 104, 105, 106, 107, 108, 109, 110, 111, 112, 113, 114, 115, 116, 117, 577, 579, 581, 583, 585, 587, 589, 591, 593, 595, 597, 599, 601, 603, 605, 607, 609, 611, 613, 615, 617, 619, 621, 623, 625, 627, or 637, a variant, derivative, orthologue, paralogue or homologue thereof, in which: the amino acid at Mutated site 4 is Pro, and the amino acid at Mutated site 5 is Glu.

[1141] In another preferred embodiment, the mutated PPO comprises a sequence of SEQ ID NO: 1, 2, 3, 4, 5, 6, 7, 8, 9, 10, 11, 12, 13, 14, 15, 16, 17, 18, 19, 20, 21, 22, 23, 24, 25, 26, 27, 28, 29, 30, 31, 32, 33, 34, 35, 36, 37, 38, 39, 40, 41, 42, 43, 44, 45, 46, 47, 48, 49, 50, 51, 52, 53, 54, 55, 56, 57, 58, 59, 60, 61, 62, 63, 64, 65, 66, 67, 68, 69, 70, 71, 72, 73, 74, 75, 76, 77, 78, 79, 80, 81, 82, 83, 84, 85, 86, 87, 88, 89, 90, 91, 92, 93, 94, 95, 96, 97, 98, 99, 100, 101, 102, 103, 104, 105, 106, 107, 108, 109, 110, 111, 112, 113, 114, 115, 116, 117, 577, 579, 581, 583, 585, 587, 589, 591, 593, 595, 597, 599, 601, 603, 605, 607, 609, 611, 613, 615, 617, 619, 621, 623, 625, 627, or 637, a variant, derivative, orthologue, paralogue or homologue thereof, in which: the amino acid at Mutated site 4 is Pro, and the amino acid at Mutated site 5 is Ser.

[1142] In another preferred embodiment, the mutated PPO comprises a sequence of SEQ ID NO: 1, 2, 3, 4, 5, 6, 7, 8, 9, 10, 11, 12, 13, 14, 15, 16, 17, 18, 19, 20, 21, 22, 23, 24, 25, 26, 27, 28, 29, 30, 31, 32, 33, 34, 35, 36, 37, 38, 39, 40, 41, 42, 43, 44, 45, 46, 47, 48, 49, 50, 51, 52, 53, 54, 55, 56, 57, 58, 59, 60, 61, 62, 63, 64, 65, 66, 67, 68, 69, 70, 71, 72, 73, 74, 75, 76, 77, 78, 79, 80, 81, 82, 83, 84, 85, 86, 87, 88, 89, 90, 91, 92, 93, 94, 95, 96, 97, 98, 99, 100, 101, 102, 103, 104, 105, 106, 107, 108, 109, 110, 111, 112, 113, 114, 115, 116, 117, 577, 579, 581, 583, 585, 587, 589, 591, 593, 595, 597, 599, 601, 603, 605, 607, 609, 611, 613, 615, 617, 619, 621, 623, 625, 627, or 637, a variant, derivative, orthologue, paralogue or homologue thereof, in which: the amino acid at Mutated site 4 is Pro, and the amino acid at Mutated site 5 is Thr.

[1143] In another preferred embodiment, the mutated PPO comprises a sequence of SEQ ID NO: 1, 2, 3, 4, 5, 6, 7, 8, 9, 10, 11, 12, 13, 14, 15, 16, 17, 18, 19, 20, 21, 22, 23, 24, 25, 26, 27, 28, 29, 30, 31, 32, 33, 34, 35, 36, 37, 38, 39, 40, 41, 42, 43, 44, 45, 46, 47, 48, 49, 50, 51, 52, 53, 54, 55, 56, 57, 58, 59, 60, 61, 62, 63, 64, 65, 66, 67, 68, 69, 70, 71, 72, 73, 74, 75, 76, 77, 78, 79, 80, 81, 82, 83, 84, 85, 86, 87, 88, 89, 90, 91, 92, 93, 94, 95, 96, 97, 98, 99, 100, 101, 102, 103, 104, 105, 106, 107, 108, 109, 110, 111, 112, 113, 114, 115, 116, 117, 577, 579, 581, 583, 585, 587, 589, 591, 593, 595, 597, 599, 601, 603, 605, 607, 609, 611, 613, 615, 617, 619, 621, 623, 625, 627, or 637, a variant, derivative, orthologue, paralogue or homologue thereof, in which: the amino acid at Mutated site 4 is Pro, and the amino acid at Mutated site 5 is Asn.

[1144] In another preferred embodiment, the mutated PPO comprises a sequence of SEQ ID NO: 1, 2, 3, 4, 5, 6, 7, 8, 9, 10, 11, 12, 13, 14, 15, 16, 17, 18, 19, 20, 21, 22, 23, 24, 25, 26, 27, 28, 29, 30, 31, 32, 33, 34, 35, 36, 37, 38, 39, 40, 41, 42, 43, 44, 45, 46, 47, 48, 49, 50, 51, 52, 53, 54, 55, 56, 57, 58, 59, 60, 61, 62, 63, 64, 65, 66, 67, 68, 69, 70, 71, 72, 73, 74, 75, 76, 77, 78, 79, 80, 81, 82, 83, 84, 85, 86, 87, 88, 89, 90, 91, 92, 93, 94, 95, 96, 97, 98, 99, 100, 101, 102, 103, 104, 105, 106, 107, 108, 109, 110, 111, 112, 113, 114, 115, 116, 117, 577, 579, 581, 583, 585, 587, 589, 591, 593, 595, 597, 599, 601, 603, 605, 607, 609, 611, 613, 615, 617, 619, 621, 623, 625, 627, or 637, a variant, derivative, orthologue, paralogue or homologue thereof, in which: the amino acid at Mutated site 4 is Pro, and the amino acid at Mutated site 5 is Gln.

[1145] In another preferred embodiment, the mutated PPO comprises a sequence of SEQ ID NO: 1, 2, 3, 4, 5, 6, 7, 8, 9, 10, 11, 12, 13, 14, 15, 16, 17, 18, 19, 20, 21, 22, 23, 24, 25, 26, 27, 28, 29, 30, 31, 32, 33, 34, 35, 36, 37, 38, 39, 40, 41, 42, 43, 44, 45, 46, 47, 48, 49, 50, 51, 52, 53, 54, 55, 56, 57, 58, 59, 60, 61, 62, 63, 64, 65, 66, 67, 68, 69, 70, 71, 72, 73, 74, 75, 76, 77, 78, 79, 80, 81, 82, 83, 84, 85, 86, 87, 88, 89, 90, 91, 92, 93, 94, 95, 96, 97, 98, 99, 100, 101, 102, 103, 104, 105, 106, 107, 108, 109, 110, 111, 112, 113, 114, 115, 116, 117, 577, 579, 581, 583, 585, 587, 589, 591, 593, 595, 597, 599, 601, 603, 605, 607, 609, 611, 613, 615, 617, 619, 621, 623, 625, 627, or 637, a variant, derivative, orthologue, paralogue or homologue thereof, in which: the amino acid at Mutated site 4 is Pro, and the amino acid at Mutated site 5 is Cys.

[1146] In another preferred embodiment, the mutated PPO comprises a sequence of SEQ ID NO: 1, 2, 3, 4, 5, 6, 7, 8, 9, 10, 11, 12, 13, 14, 15, 16, 17, 18, 19, 20, 21, 22, 23, 24, 25, 26, 27, 28, 29, 30, 31, 32, 33, 34, 35, 36, 37, 38, 39, 40, 41, 42, 43, 44, 45, 46, 47, 48, 49, 50, 51, 52, 53, 54, 55, 56, 57, 58, 59, 60, 61, 62, 63, 64, 65, 66, 67, 68, 69, 70, 71, 72, 73, 74, 75, 76, 77, 78, 79, 80, 81, 82, 83, 84, 85, 86, 87, 88, 89, 90, 91, 92, 93, 94, 95, 96, 97, 98, 99, 100, 101, 102, 103, 104, 105, 106, 107, 108, 109, 110, 111, 112, 113, 114, 115, 116, 117, 577, 579, 581, 583, 585, 587, 589, 591, 593, 595, 597, 599, 601, 603, 605, 607, 609, 611, 613, 615, 617, 619, 621, 623, 625, 627, or 637, a variant, derivative, orthologue, paralogue or homologue thereof, in which: the amino acid at Mutated site 4 is Pro, and the amino acid at Mutated site 5 is Gly.

[1147] In another preferred embodiment, the mutated PPO comprises a sequence of SEQ ID NO: 1, 2, 3, 4, 5, 6, 7, 8, 9, 10, 11, 12, 13, 14, 15, 16, 17, 18, 19, 20, 21, 22, 23, 24, 25, 26, 27, 28, 29, 30, 31, 32, 33, 34, 35, 36, 37, 38, 39, 40, 41, 42, 43, 44, 45, 46, 47, 48, 49, 50, 51, 52, 53, 54, 55, 56, 57, 58, 59, 60, 61, 62, 63, 64, 65, 66, 67, 68, 69, 70, 71, 72, 73, 74, 75, 76, 77, 78, 79, 80, 81, 82, 83, 84, 85, 86, 87, 88, 89, 90, 91, 92, 93, 94, 95, 96, 97, 98, 99, 100, 101, 102, 103, 104, 105, 106, 107, 108, 109, 110, 111, 112, 113, 114, 115, 116, 117, 577, 579, 581, 583, 585, 587, 589, 591, 593, 595, 597, 599, 601, 603, 605, 607, 609, 611, 613, 615, 617, 619, 621, 623, 625, 627, or 637, a variant, derivative, orthologue, paralogue or homologue thereof, in which: the amino acid at Mutated site 4 is Pro, and the amino acid at Mutated site 5 is Pro.

[1148] In another preferred embodiment, the mutated PPO comprises a sequence of SEQ ID NO: 1, 2, 3, 4, 5, 6, 7, 8, 9, 10, 11, 12, 13, 14, 15, 16, 17, 18, 19, 20, 21, 22, 23, 24, 25, 26, 27, 28, 29, 30, 31, 32, 33, 34, 35, 36, 37, 38, 39, 40, 41, 42, 43, 44, 45, 46, 47, 48, 49, 50, 51, 52, 53, 54, 55, 56, 57, 58, 59, 60, 61, 62, 63, 64, 65, 66, 67, 68, 69, 70, 71, 72, 73, 74, 75, 76, 77, 78, 79, 80, 81, 82, 83, 84, 85, 86, 87, 88, 89, 90, 91, 92, 93, 94, 95, 96, 97, 98, 99, 100, 101, 102, 103, 104, 105, 106, 107, 108, 109, 110, 111, 112, 113, 114, 115, 116, 117, 577, 579, 581, 583, 585, 587, 589, 591, 593, 595, 597, 599, 601, 603, 605, 607, 609, 611, 613, 615, 617, 619, 621, 623, 625, 627, or 637, a variant, derivative, orthologue, paralogue or homologue thereof, in which: the amino acid at Mutated site 4 is Pro, and the amino acid at Mutated site 5 is Arg.

[1149] In another preferred embodiment, the mutated PPO comprises a sequence of SEQ ID NO: 1, 2, 3, 4, 5, 6, 7, 8, 9, 10, 11, 12, 13, 14, 15, 16, 17, 18, 19, 20, 21, 22, 23, 24, 25, 26, 27, 28, 29, 30, 31, 32, 33, 34, 35, 36, 37, 38, 39, 40, 41, 42, 43, 44, 45, 46, 47, 48, 49, 50, 51, 52, 53, 54, 55, 56, 57, 58, 59, 60, 61, 62, 63, 64, 65, 66, 67, 68, 69, 70, 71, 72, 73, 74, 75, 76, 77, 78, 79, 80, 81, 82, 83, 84, 85, 86, 87, 88, 89, 90, 91, 92, 93, 94, 95, 96, 97, 98, 99, 100, 101, 102, 103, 104, 105, 106, 107, 108, 109, 110, 111, 112, 113, 114, 115, 116, 117, 577, 579, 581, 583, 585, 587, 589, 591, 593, 595, 597, 599, 601, 603, 605, 607, 609, 611, 613, 615, 617, 619, 621, 623, 625, 627, or 637, a variant, derivative, orthologue, paralogue or homologue thereof, in which: the amino acid at Mutated site 4 is Pro, and the amino acid at Mutated site 5 is Tyr.

[1150] In another preferred embodiment, the mutated PPO comprises a sequence of SEQ ID NO: 1, 2, 3, 4, 5, 6, 7, 8, 9, 10, 11, 12, 13, 14, 15, 16, 17, 18, 19, 20, 21, 22, 23, 24, 25, 26, 27, 28, 29, 30, 31, 32, 33, 34, 35, 36, 37, 38, 39, 40, 41, 42, 43, 44, 45, 46, 47, 48, 49, 50, 51, 52, 53, 54, 55, 56, 57, 58, 59, 60, 61, 62, 63, 64, 65, 66, 67, 68, 69, 70, 71, 72, 73, 74, 75, 76, 77, 78, 79, 80, 81, 82, 83, 84, 85, 86, 87, 88, 89, 90, 91, 92, 93, 94, 95, 96, 97, 98, 99, 100, 101, 102, 103, 104, 105, 106, 107, 108, 109, 110, 111, 112, 113, 114, 115, 116, 117, 577, 579, 581, 583, 585, 587, 589, 591, 593, 595, 597, 599, 601, 603, 605, 607, 609, 611, 613, 615, 617, 619, 621, 623, 625, 627, or 637, a variant, derivative, orthologue, paralogue or homologue thereof, in which: the amino acid at Mutated site 4 is Pro, and the amino acid at Mutated site 5 is Trp.

[1151] In another preferred embodiment, the mutated PPO comprises a sequence of SEQ ID NO: 1, 2, 3, 4, 5, 6, 7, 8, 9, 10, 11, 12, 13, 14, 15, 16, 17, 18, 19, 20, 21, 22, 23, 24, 25, 26, 27, 28, 29, 30, 31, 32, 33, 34, 35, 36, 37, 38, 39, 40, 41, 42, 43, 44, 45, 46, 47, 48, 49, 50, 51, 52, 53, 54, 55, 56, 57, 58, 59, 60, 61, 62, 63, 64, 65, 66, 67, 68, 69, 70, 71, 72, 73, 74, 75, 76, 77, 78, 79, 80, 81, 82, 83, 84, 85, 86, 87, 88, 89, 90, 91, 92, 93, 94, 95, 96, 97, 98, 99, 100, 101, 102, 103, 104, 105, 106, 107, 108, 109, 110, 111, 112, 113, 114, 115, 116, 117, 577, 579, 581, 583, 585, 587, 589, 591, 593, 595, 597, 599, 601, 603, 605, 607, 609, 611, 613, 615, 617, 619, 621, 623, 625, 627, or 637, a variant, derivative, orthologue, paralogue or homologue thereof, in which: the amino acid at Mutated site 4 is Phe, and the amino acid at Mutated site 5 is Ala.

[1152] In another preferred embodiment, the mutated PPO comprises a sequence of SEQ ID NO: 1, 2, 30, 31, 32, 33, 34, 35, 36, 37, 38, 39, 40, 41, 42, 43, 44, 45, 46, 47, 48, 49, 50, 51, 52, 53, 54, 55, 56, 57, 58, 59, 60, 61, 62, 63, 64, 65, 66, 67, 68, 69, 70, 71, 72, 73, 74, 75, 76, 77, 78, 79, 80, 81, 82, 83, 84, 85, 86, 87, 88, 89, 90, 91, 92, 93, 94, 95, 96, 97, 98, 99, 100, 101, 102, 103, 104, 105, 106, 107, 108, 109, 110, 111, 112, 113, 114, 115, 116, 117, 577, 579, 581, 583, 585, 587, 589, 591, 593, 595, 597, 599, 601,603, 605, 607, 609, 611,613, 615, 617, 619, 621,623, 625, 627, or 637, a variant, derivative, orthologue, paralogue or homologue thereof, in which: the amino acid at Mutated site 4 is Phe, and the amino acid at Mutated site 5 is Leu.

[1153] In another preferred embodiment, the mutated PPO comprises a sequence of SEQ ID NO: 1, 2, 3, 4, 5, 6, 7, 8, 9, 10, 11, 12, 13, 14, 15, 16, 17, 18, 19, 20, 21, 22, 23, 24, 25, 26, 27, 28, 29, 30, 31, 32, 33, 34, 35, 36, 37, 38, 39, 40, 41, 42, 43, 44, 45, 46, 47, 48, 49, 50, 51, 52, 53, 54, 55, 56, 57, 58, 59, 60, 61, 62, 63, 64, 65, 66, 67, 68, 69, 70, 71, 72, 73, 74, 75, 76, 77, 78, 79, 80, 81, 82, 83, 84, 85, 86, 87, 88, 89, 90, 91, 92, 93, 94, 95, 96, 97, 98, 99, 100, 101, 102, 103, 104, 105, 106, 107, 108, 109, 110, 111, 112, 113, 114, 115, 116, 117, 577, 579, 581, 583, 585, 587, 589, 591, 593, 595,597, 599, 601, 603, 605, 607, 609, 611, 613, 615, 617, 619, 621, 623, 625, 627, or 637, a variant, derivative, orthologue, paralogue or homologue thereof, in which: the amino acid at Mutated site 4 is Phe, and the amino acid at Mutated site 5 is Val.

[1154] In another preferred embodiment, the mutated PPO comprises a sequence of SEQ ID NO: 1, 2, 3, 4, 5, 6, 7, 8, 9, 10, 11, 12, 13, 14, 15, 16, 17, 18, 19, 20, 21, 22, 23, 24, 25, 26, 27, 28, 29, 30, 31, 32, 33, 34, 35, 36, 37, 38, 39, 40, 41, 42, 43, 44, 45, 46, 47, 48, 49, 50, 51, 52, 53, 54, 55, 56, 57, 58, 59, 60, 61, 62, 63, 64, 65, 66, 67, 68, 69, 70, 71, 72, 73, 74, 75, 76, 77, 78, 79, 80, 81, 82, 83, 84, 85, 86, 87, 88, 89, 90, 91, 92, 93, 94, 95, 96, 97, 98, 99, 100, 101, 102, 103, 104, 105, 106, 107, 108, 109, 110, 111, 112, 113, 114, 115, 116, 117, 577, 579, 581, 583, 585, 587, 589, 591, 593, 595, 597, 599, 601, 603, 605, 607, 609, 611, 613, 615, 617, 619, 621, 623, 625, 627, or 637, a variant, derivative, orthologue, paralogue or homologue thereof, in which: the amino acid at Mutated site 4 is Phe, and the amino acid at Mutated site 5 is Ile.

[1155] In another preferred embodiment, the mutated PPO comprises a sequence of SEQ ID NO: 1, 2, 3, 4, 5, 6, 7, 8, 9, 10, 11, 12, 13, 14, 15, 16, 17, 18, 19, 20, 21, 22, 23, 24, 25, 26, 27, 28, 29, 30, 31, 32, 33, 34, 35, 36, 37, 38, 39, 40, 41, 42, 43, 44, 45, 46, 47, 48, 49, 50, 51, 52, 53, 54, 55, 56, 57, 58, 59, 60, 61, 62, 63, 64, 65, 66, 67, 68, 69, 70, 71, 72, 73, 74, 75, 76, 77, 78, 79, 80, 81, 82, 83, 84, 85, 86, 87, 88, 89, 90, 91, 92, 93, 94, 95, 96, 97, 98, 99, 100, 101, 102, 103, 104, 105, 106, 107, 108, 109, 110, 111, 112, 113, 114, 115, 116, 117, 577, 579, 581, 583, 585, 587, 589, 591, 593, 595, 597, 599, 601, 603, 605, 607, 609, 611, 613, 615, 617, 619, 621, 623, 625, 627, or 637, a variant, derivative, orthologue, paralogue or homologue thereof, in which: the amino acid at Mutated site 4 is Phe, and the amino acid at Mutated site 5 is Met.

[1156] In another preferred embodiment, the mutated PPO comprises a sequence of SEQ ID NO: 1, 2, 3, 4, 5, 6, 7, 8, 9, 10, 11, 12, 13, 14, 15, 16, 17, 18, 19, 20, 21, 22, 23, 24, 25, 26, 27, 28, 29, 30, 31, 32, 33, 34, 35, 36, 37, 38, 39, 40, 41, 42, 43, 44, 45, 46, 47, 48, 49, 50, 51, 52, 53, 54, 55, 56, 57, 58, 59, 60, 61, 62, 63, 64, 65, 66, 67, 68, 69, 70, 71, 72, 73, 74, 75, 76, 77, 78, 79, 80, 81, 82, 83, 84, 85, 86, 87, 88, 89, 90, 91, 92, 93, 94, 95, 96, 97, 98, 99, 100, 101, 102, 103, 104, 105, 106, 107, 108, 109, 110, 111, 112, 113, 114, 115, 116, 117, 577, 579, 581, 583, 585, 587, 589, 591, 593, 595, 597, 599, 601, 603, 605, 607, 609, 611, 613, 615, 617, 619, 621, 623, 625, 627, or 637, a variant, derivative, orthologue, paralogue or homologue thereof, in which: the amino acid at Mutated site 4 is Phe, and the amino acid at Mutated site 5 is His.

[1157] In another preferred embodiment, the mutated PPO comprises a sequence of SEQ ID NO: 1, 2, 3, 4, 5, 6, 7, 8, 9, 10, 11, 12, 13, 14, 15, 16, 17, 18, 19, 20, 21, 22, 23, 24, 25, 26, 27, 28, 29, 30, 31, 32, 33, 34, 35, 36, 37, 38, 39, 40, 41, 42, 43, 44, 45, 46, 47, 48, 49, 50, 51, 52, 53, 54, 55, 56, 57, 58, 59, 60, 61, 62, 63, 64, 65, 66, 67, 68, 69, 70, 71, 72, 73, 74, 75, 76, 77, 78, 79, 80, 81, 82, 83, 84, 85, 86, 87, 88, 89, 90, 91, 92, 93, 94, 95, 96, 97, 98, 99, 100, 101, 102, 103, 104, 105, 106, 107, 108, 109, 110, 111, 112, 113, 114, 115, 116, 117, 577, 579, 581, 583, 585, 587, 589, 591, 593, 595, 597, 599, 601, 603, 605, 607, 609, 611, 613, 615, 617, 619, 621, 623, 625, 627, or 637, a variant, derivative, orthologue, paralogue or homologue thereof, in which: the amino acid at Mutated site 4 is Phe, and the amino acid at Mutated site 5 is Lys.

[1158] In another preferred embodiment, the mutated PPO comprises a sequence of SEQ ID NO: 1, 2, 3, 4, 5, 6, 7, 8, 9, 10, 11, 12, 13, 14, 15, 16, 17, 18, 19, 20, 21, 22, 23, 24, 25, 26, 27, 28, 29, 30, 31, 32, 33, 34, 35, 36, 37, 38, 39, 40, 41, 42, 43, 44, 45, 46, 47, 48, 49, 50, 51, 52, 53, 54, 55, 56, 57, 58, 59, 60, 61, 62, 63, 64, 65, 66, 67, 68, 69, 70, 71, 72, 73, 74, 75, 76, 77, 78, 79, 80, 81, 82, 83, 84, 85, 86, 87, 88, 89, 90, 91, 92, 93, 94, 95, 96, 97, 98, 99, 100, 101, 102, 103, 104, 105, 106, 107, 108, 109, 110, 111, 112, 113, 114, 115, 116, 117, 577, 579, 581, 583, 585, 587, 589, 591, 593, 595, 597, 599, 601, 603, 605, 607, 609, 611, 613, 615, 617, 619, 621, 623, 625, 627, or 637, a variant, derivative, orthologue, paralogue or homologue thereof, in which: the amino acid at Mutated site 4 is Phe, and the amino acid at Mutated site 5 is Asp.

[1159] In another preferred embodiment, the mutated PPO comprises a sequence of SEQ ID NO: 1, 2, 3, 4, 5, 6, 7, 8, 9, 10, 11, 12, 13, 14, 15, 16, 17, 18, 19, 20, 21, 22, 23, 24, 25, 26, 27, 28, 29, 30, 31, 32, 33, 34, 35, 36, 37, 38, 39, 40, 41, 42, 43, 44, 45, 46, 47, 48, 49, 50, 51, 52, 53, 54, 55, 56, 57, 58, 59, 60, 61, 62, 63, 64, 65, 66, 67, 68, 69, 70, 71, 72, 73, 74, 75, 76, 77, 78, 79, 80, 81, 82, 83, 84, 85, 86, 87, 88, 89, 90, 91, 92, 93, 94, 95, 96, 97, 98, 99, 100, 101, 102, 103, 104, 105, 106, 107, 108, 109, 110, 111, 112, 113, 114, 115, 116, 117, 577, 579, 581, 583, 585, 587, 589, 591, 593, 595, 597, 599, 601, 603, 605, 607, 609, 611, 613, 615, 617, 619, 621, 623, 625, 627, or 637, a variant, derivative, orthologue, paralogue or homologue thereof, in which: the amino acid at Mutated site 4 is Phe, and the amino acid at Mutated site 5 is Glu.

[1160] In another preferred embodiment, the mutated PPO comprises a sequence of SEQ ID NO: 1, 2, 3, 4, 5, 6, 7, 8, 9, 10, 11, 12, 13, 14, 15, 16, 17, 18, 19, 20, 21, 22, 23, 24, 25, 26, 27, 28, 29, 30, 31, 32, 33, 34, 35, 36, 37, 38, 39, 40, 41, 42, 43, 44, 45, 46, 47, 48, 49, 50, 51, 52, 53, 54, 55, 56, 57, 58, 59, 60, 61, 62, 63, 64, 65, 66, 67, 68, 69, 70, 71, 72, 73, 74, 75, 76, 77, 78, 79, 80, 81, 82, 83, 84, 85, 86, 87, 88, 89, 90, 91, 92, 93, 94, 95, 96, 97, 98, 99, 100, 101, 102, 103, 104, 105, 106, 107, 108, 109, 110, 111, 112, 113, 114, 115, 116, 117, 577, 579, 581, 583, 585, 587, 589, 591, 593, 595, 597, 599, 601, 603, 605, 607, 609, 611, 613, 615, 617, 619, 621, 623, 625, 627, or 637, a variant, derivative, orthologue, paralogue or homologue thereof, in which: the amino acid at Mutated site 4 is Phe, and the amino acid at Mutated site 5 is Ser.

[1161] In another preferred embodiment, the mutated PPO comprises a sequence of SEQ ID NO: 1, 2, 3, 4, 5, 6, 7, 8, 9, 10, 11, 12, 13, 14, 15, 16, 17, 18, 19, 20, 21, 22, 23, 24, 25, 26, 27, 28, 29, 30, 31, 32, 33, 34, 35, 36, 37, 38, 39, 40, 41, 42, 43, 44, 45, 46, 47, 48, 49, 50, 51, 52, 53, 54, 55, 56, 57, 58, 59, 60, 61, 62, 63, 64, 65, 66, 67, 68, 69, 70, 71, 72, 73, 74, 75, 76, 77, 78, 79, 80, 81, 82, 83, 84, 85, 86, 87, 88, 89, 90, 91, 92, 93, 94, 95, 96, 97, 98, 99, 100, 101, 102, 103, 104, 105, 106, 107, 108, 109, 110, 111, 112, 113, 114, 115, 116, 117, 577, 579, 581, 583, 585, 587, 589, 591, 593, 595, 597, 599, 601, 603, 605, 607, 609, 611, 613, 615, 617, 619, 621, 623, 625, 627, or 637, a variant, derivative, orthologue, paralogue or homologue thereof, in which: the amino acid at Mutated site 4 is Phe, and the amino acid at Mutated site 5 is Thr.

[1162] In another preferred embodiment, the mutated PPO comprises a sequence of SEQ ID NO: 1, 2, 3, 4, 5, 6, 7, 8, 9, 10, 11, 12, 13, 14, 15, 16, 17, 18, 19, 20, 21, 22, 23, 24, 25, 26, 27, 28, 29, 30, 31, 32, 33, 34, 35, 36, 37, 38, 39, 40, 41, 42, 43, 44, 45, 46, 47, 48, 49, 50, 51, 52, 53, 54, 55, 56, 57, 58, 59, 60, 61, 62, 63, 64, 65, 66, 67, 68, 69, 70, 71, 72, 73, 74, 75, 76, 77, 78, 79, 80, 81, 82, 83, 84, 85, 86, 87, 88, 89, 90, 91, 92, 93, 94, 95, 96, 97, 98, 99, 100, 101, 102, 103, 104, 105, 106, 107, 108, 109, 110, 111, 112, 113, 114, 115, 116, 117, 577, 579, 581, 583, 585, 587, 589, 591, 593, 595, 597, 599, 601,603, 605, 607, 609, 611,613, 615, 617, 619, 621,623, 625, 627, or 637, a variant, derivative, orthologue, paralogue or homologue thereof, in which: the amino acid at Mutated site 4 is Phe, and the amino acid at Mutated site 5 is Asn.

[1163] In another preferred embodiment, the mutated PPO comprises a sequence of SEQ ID NO: 1, 2, 3, 4, 5, 6, 7, 8, 9, 10, 11, 12, 13, 14, 15, 16, 17, 18, 19, 20, 21, 22, 23, 24, 25, 26, 27, 28, 29, 30, 31, 32, 33, 34, 35, 36, 37, 38, 39, 40, 41, 42, 43, 44, 45, 46, 47, 48, 49, 50, 51, 52, 53, 54, 55, 56, 57, 58, 59, 60, 61, 62, 63, 64, 65, 66, 67, 68, 69, 70, 71, 72, 73, 74, 75, 76, 77, 78, 79, 80, 81, 82, 83, 84, 85, 86, 87, 88, 89, 90, 91, 92, 93, 94, 95, 96, 97, 98, 99, 100, 101, 102, 103, 104, 105, 106, 107, 108, 109, 110, 111, 112, 113, 114, 115, 116, 117, 577, 579, 581, 583, 585, 587, 589, 591, 593, 595, 597, 599, 601, 603, 605, 607, 609, 611, 613, 615, 617, 619, 621, 623, 625, 627, or 637, a variant, derivative, orthologue, paralogue or homologue thereof, in which: the amino acid at Mutated site 4 is Phe, and the amino acid at Mutated site 5 is Gln.

[1164] In another preferred embodiment, the mutated PPO comprises a sequence of SEQ ID NO: 1, 2, 3, 4, 5, 6, 7, 8, 9, 10, 11, 12, 13, 14, 15, 16, 17, 18, 19, 20, 21, 22, 23, 24, 25, 26, 27, 28, 29, 30, 31, 32, 33, 34, 35, 36, 37, 38, 39, 40, 41, 42, 43, 44, 45, 46, 47, 48, 49, 50, 51, 52, 53, 54, 55, 56, 57, 58, 59, 60, 61, 62, 63, 64, 65, 66, 67, 68, 69, 70, 71, 72, 73, 74, 75, 76, 77, 78, 79, 80, 81, 82, 83, 84, 85, 86, 87, 88, 89, 90, 91, 92, 93, 94, 95, 96, 97, 98, 99, 100, 101, 102, 103, 104, 105, 106, 107, 108, 109, 110, 111, 112, 113, 114, 115, 116, 117, 577, 579, 581, 583, 585, 587, 589, 591, 593, 595, 597, 599, 601, 603, 605, 607, 609, 611, 613, 615, 617, 619, 621, 623, 625, 627, or 637, a variant, derivative, orthologue, paralogue or homologue thereof, in which: the amino acid at Mutated site 4 is Phe, and the amino acid at Mutated site 5 is Cys.

[1165] In another preferred embodiment, the mutated PPO comprises a sequence of SEQ ID NO: 1, 2, 3, 4, 5, 6, 7, 8, 9, 10, 11, 12, 13, 14, 15, 16, 17, 18, 19, 20, 21, 22, 23, 24, 25, 26, 27, 28, 29, 30, 31, 32, 33, 34, 35, 36, 37, 38, 39, 40, 41, 42, 43, 44, 45, 46, 47, 48, 49, 50, 51, 52, 53, 54, 55, 56, 57, 58, 59, 60, 61, 62, 63, 64, 65, 66, 67, 68, 69, 70, 71, 72, 73, 74, 75, 76, 77, 78, 79, 80, 81, 82, 83, 84, 85, 86, 87, 88, 89, 90, 91, 92, 93, 94, 95, 96, 97, 98, 99, 100, 101, 102, 103, 104, 105, 106, 107, 108, 109, 110, 111, 112, 113, 114, 115, 116, 117, 577, 579, 581, 583, 585, 587, 589, 591, 593, 595, 597, 599, 601, 603, 605, 607, 609, 611, 613, 615, 617, 619, 621, 623, 625, 627, or 637, a variant, derivative, orthologue, paralogue or homologue thereof, in which: the amino acid at Mutated site 4 is Phe, and the amino acid at Mutated site 5 is Gly.

[1166] In another preferred embodiment, the mutated PPO comprises a sequence of SEQ ID NO: 1, 2, 3, 4, 5, 6, 7, 8, 9, 10, 11, 12, 13, 14, 15, 16, 17, 18, 19, 20, 21, 22, 23, 24, 25, 26, 27, 28, 29, 30, 31, 32, 33, 34, 35, 36, 37, 38, 39, 40, 41, 42, 43, 44, 45, 46, 47, 48, 49, 50, 51, 52, 53, 54, 55, 56, 57, 58, 59, 60, 61, 62, 63, 64, 65, 66, 67, 68, 69, 70, 71, 72, 73, 74, 75, 76, 77, 78, 79, 80, 81, 82, 83, 84, 85, 86, 87, 88, 89, 90, 91, 92, 93, 94, 95, 96, 97, 98, 99, 100, 101, 102, 103, 104, 105, 106, 107, 108, 109, 110, 111, 112, 113, 114, 115, 116, 117, 577, 579, 581, 583, 585, 587, 589, 591, 593, 595, 597, 599, 601, 603, 605, 607, 609, 611, 613, 615, 617, 619, 621, 623, 625, 627, or 637, a variant, derivative, orthologue, paralogue or homologue thereof, in which: the amino acid at Mutated site 4 is Phe, and the amino acid at Mutated site 5 is Pro.

[1167] In another preferred embodiment, the mutated PPO comprises a sequence of SEQ ID NO: 1, 2, 3, 4, 5, 6, 7, 8, 9, 10, 11, 12, 13, 14, 15, 16, 17, 18, 19, 20, 21, 22, 23, 24, 25, 26, 27, 28, 29, 30, 31, 32, 33, 34, 35, 36, 37, 38, 39, 40, 41, 42, 43, 44, 45, 46, 47, 48, 49, 50, 51, 52, 53, 54, 55, 56, 57, 58, 59, 60, 61, 62, 63, 64, 65, 66, 67, 68, 69, 70, 71, 72, 73, 74, 75, 76, 77, 78, 79, 80, 81, 82, 83, 84, 85, 86, 87, 88, 89, 90, 91, 92, 93, 94, 95, 96, 97, 98, 99, 100, 101, 102, 103, 104, 105, 106, 107, 108, 109, 110, 111, 112, 113, 114, 115, 116, 117, 577, 579, 581, 583, 585, 587, 589, 591, 593, 595, 597, 599, 601, 603, 605, 607, 609, 611, 613, 615, 617, 619, 621, 623, 625, 627, or 637, a variant, derivative, orthologue, paralogue or homologue thereof, in which: the amino acid at Mutated site 4 is Phe, and the amino acid at Mutated site 5 is Arg.

[1168] In another preferred embodiment, the mutated PPO comprises a sequence of SEQ ID NO: 1, 2, 3, 4, 5, 6, 7, 8, 9, 10, 11, 12, 13, 14, 15, 16, 17, 18, 19, 20, 21, 22, 23, 24, 25, 26, 27, 28, 29, 30, 31, 32, 33, 34, 35, 36, 37, 38, 39, 40, 41, 42, 43, 44, 45, 46, 47, 48, 49, 50, 51, 52, 53, 54, 55, 56, 57, 58, 59, 60, 61, 62, 63, 64, 65, 66, 67, 68, 69, 70, 71, 72, 73, 74, 75, 76, 77, 78, 79, 80, 81, 82, 83, 84, 85, 86, 87, 88, 89, 90, 91, 92, 93, 94, 95, 96, 97, 98, 99, 100, 101, 102, 103, 104, 105, 106, 107, 108, 109, 110, 111, 112, 113, 114, 115, 116, 117, 577, 579, 581, 583, 585, 587, 589, 591, 593, 595, 597, 599, 601, 603, 605, 607, 609, 611, 613, 615, 617, 619, 621, 623, 625, 627, or 637, a variant, derivative, orthologue, paralogue or homologue thereof, in which: the amino acid at Mutated site 4 is Phe, and the amino acid at Mutated site 5 is Tyr.

[1169] In another preferred embodiment, the mutated PPO comprises a sequence of SEQ ID NO: 1, 2, 3, 4, 5, 6, 7, 8, 9, 10, 11, 12, 13, 14, 15, 16, 17, 18, 19, 20, 21, 22, 23, 24, 25, 26, 27, 28, 29, 30, 31, 32, 33, 34, 35, 36, 37, 38, 39, 40, 41, 42, 43, 44, 45, 46, 47, 48, 49, 50, 51, 52, 53, 54, 55, 56, 57, 58, 59, 60, 61, 62, 63, 64, 65, 66, 67, 68, 69, 70, 71, 72, 73, 74, 75, 76, 77, 78, 79, 80, 81, 82, 83, 84, 85, 86, 87, 88, 89, 90, 91, 92, 93, 94, 95, 96, 97, 98, 99, 100, 101, 102, 103, 104, 105, 106, 107, 108, 109, 110, 111, 112, 113, 114, 115, 116, 117, 577, 579, 581, 583, 585, 587, 589, 591, 593, 595, 597, 599, 601, 603, 605, 607, 609, 611, 613, 615, 617, 619, 621, 623, 625, 627, or 637, a variant, derivative, orthologue, paralogue or homologue thereof, in which: the amino acid at Mutated site 4 is Phe, and the amino acid at Mutated site 5 is Trp.

[1170] In another preferred embodiment, the mutated PPO comprises a sequence of SEQ ID NO: 1, 2, 3, 4, 5, 6, 7, 8, 9, 10, 11, 12, 13, 14, 15, 16, 17, 18, 19, 20, 21, 22, 23, 24, 25, 26, 27, 28, 29, 30, 31, 32, 33, 34, 35, 36, 37, 38, 39, 40, 41, 42, 43, 44, 45, 46, 47, 48, 49, 50, 51, 52, 53, 54, 55, 56, 57, 58, 59, 60, 61, 62, 63, 64, 65, 66, 67, 68, 69, 70, 71, 72, 73, 74, 75, 76, 77, 78, 79, 80, 81, 82, 83, 84, 85, 86, 87, 88, 89, 90, 91, 92, 93, 94, 95, 96, 97, 98, 99, 100, 101, 102, 103, 104, 105, 106, 107, 108, 109, 110, 111, 112, 113, 114, 115, 116, 117, 577, 579, 581, 583, 585, 587, 589, 591, 593, 595, 597, 599, 601, 603, 605, 607, 609, 611, 613, 615, 617, 619, 621, 623, 625, 627, or 637, a variant, derivative, orthologue, paralogue or homologue thereof, in which: the amino acid at Mutated site 4 is Tyr, and the amino acid at Mutated site 5 is Ala.

[1171] In another preferred embodiment, the mutated PPO comprises a sequence of SEQ ID NO: 1, 2, 3, 4, 5, 6, 7, 8, 9, 10, 11, 12, 13, 14, 15, 16, 17, 18, 19, 20, 21, 22, 23, 24, 25, 26, 27, 28, 29, 30, 31, 32, 33, 34, 35, 36, 37, 38, 39, 40, 41, 42, 43, 44, 45, 46, 47, 48, 49, 50, 51, 52, 53, 54, 55, 56, 57, 58, 59, 60, 61, 62, 63, 64, 65, 66, 67, 68, 69, 70, 71, 72, 73, 74, 75, 76, 77, 78, 79, 80, 81, 82, 83, 84, 85, 86, 87, 88, 89, 90, 91, 92, 93, 94, 95, 96, 97, 98, 99, 100, 101, 102, 103, 104, 105, 106, 107, 108, 109, 110, 111, 112, 113, 114, 115, 116, 117, 577, 579, 581, 583, 585, 587, 589, 591, 593, 595, 597, 599, 601, 603, 605, 607, 609, 611, 613, 615, 617, 619, 621, 623, 625, 627, or 637, a variant, derivative, orthologue, paralogue or homologue thereof, in which: the amino acid at Mutated site 4 is Tyr, and the amino acid at Mutated site 5 is Leu.

[1172] In another preferred embodiment, the mutated PPO comprises a sequence of SEQ ID NO: 1, 2, 3, 4, 5, 6, 7, 8, 9, 10, 11, 12, 13, 14, 15, 16, 17, 18, 19, 20, 21, 22, 23, 24, 25, 26, 27, 28, 29, 30, 31, 32, 33, 34, 35, 36, 37, 38, 39, 40, 41, 42, 43, 44, 45, 46, 47, 48, 49, 50, 51, 52, 53, 54, 55, 56, 57, 58, 59, 60, 61, 62, 63, 64, 65, 66, 67, 68, 69, 70, 71, 72, 73, 74, 75, 76, 77, 78, 79, 80, 81, 82, 83, 84, 85, 86, 87, 88, 89, 90, 91, 92, 93, 94, 95, 96, 97, 98, 99, 100, 101, 102, 103, 104, 105, 106, 107, 108, 109, 110, 111, 112, 113, 114, 115, 116, 117, 577, 579, 581, 583, 585, 587, 589, 591, 593, 595, 597, 599, 601, 603, 605, 607, 609, 611, 613, 615, 617, 619, 621, 623, 625, 627, or 637, a variant, derivative, orthologue, paralogue or homologue thereof, in which: the amino acid at Mutated site 4 is Tyr, and the amino acid at Mutated site 5 is Val.

[1173] In another preferred embodiment, the mutated PPO comprises a sequence of SEQ ID NO: 1, 2, 3, 4, 5, 6, 7, 8, 9, 10, 11, 12, 13, 14, 15, 16, 17, 18, 19, 20, 21, 22, 23, 24, 25, 26, 27, 28, 29, 30, 31, 32, 33, 34, 35, 36, 37, 38, 39, 40, 41, 42, 43, 44, 45, 46, 47, 48, 49, 50, 51, 52, 53, 54, 55, 56, 57, 58, 59, 60, 61, 62, 63, 64, 65, 66, 67, 68, 69, 70, 71, 72, 73, 74, 75, 76, 77, 78, 79, 80, 81, 82, 83, 84, 85, 86, 87, 88, 89, 90, 91, 92, 93, 94, 95, 96, 97, 98, 99, 100, 101, 102, 103, 104, 105, 106, 107, 108, 109, 110, 111, 112, 113, 114, 115, 116, 117, 577, 579, 581, 583, 585, 587, 589, 591, 593, 595, 597, 599, 601, 603, 605, 607, 609, 611, 613, 615, 617, 619, 621, 623, 625, 627, or 637, a variant, derivative, orthologue, paralogue or homologue thereof, in which: the amino acid at Mutated site 4 is Tyr, and the amino acid at Mutated site 5 is Ile.

[1174] In another preferred embodiment, the mutated PPO comprises a sequence of SEQ ID NO: 1, 2, 3, 4, 5, 6, 7, 8, 9, 10, 11, 12, 13, 14, 15, 16, 17, 18, 19, 20, 21, 22, 23, 24, 25, 26, 27, 28, 29, 30, 31, 32, 33, 34, 35, 36, 37, 38, 39, 40, 41, 42, 43, 44, 45, 46, 47, 48, 49, 50, 51, 52, 53, 54, 55, 56, 57, 58, 59, 60, 61, 62, 63, 64, 65, 66, 67, 68, 69, 70, 71, 72, 73, 74, 75, 76, 77, 78, 79, 80, 81, 82, 83, 84, 85, 86, 87, 88, 89, 90, 91, 92, 93, 94, 95, 96, 97, 98, 99, 100, 101, 102, 103, 104, 105, 106, 107, 108, 109, 110, 111, 112, 113, 114, 115, 116, 117, 577, 579, 581, 583, 585, 587, 589, 591, 593, 595, 597, 599, 601, 603, 605, 607, 609, 611, 613, 615, 617, 619, 621, 623, 625, 627, or 637, a variant, derivative, orthologue, paralogue or homologue thereof, in which: the amino acid at Mutated site 4 is Tyr, and the amino acid at Mutated site 5 is Met.

[1175] In another preferred embodiment, the mutated PPO comprises a sequence of SEQ ID NO: 1, 2, 3, 4, 5, 6, 7, 8, 9, 10, 11, 12, 13, 14, 15, 16, 17, 18, 19, 20, 21, 22, 23, 24, 25, 26, 27, 28, 29, 30, 31, 32, 33, 34, 35, 36, 37, 38, 39, 40, 41, 42, 43, 44, 45, 46, 47, 48, 49, 50, 51, 52, 53, 54, 55, 56, 57, 58, 59, 60, 61, 62, 63, 64, 65, 66, 67, 68, 69, 70, 71, 72, 73, 74, 75, 76, 77, 78, 79, 80, 81, 82, 83, 84, 85, 86, 87, 88, 89, 90, 91, 92, 93, 94, 95, 96, 97, 98, 99, 100, 101, 102, 103, 104, 105, 106, 107, 108, 109, 110, 111, 112, 113, 114, 115, 116, 117, 577, 579, 581, 583, 585, 587, 589, 591, 593, 595, 597, 599, 601, 603, 605, 607, 609, 611, 613, 615, 617, 619, 621, 623, 625, 627, or 637, a variant, derivative, orthologue, paralogue or homologue thereof, in which: the amino acid at Mutated site 4 is Tyr, and the amino acid at Mutated site 5 is His.

[1176] In another preferred embodiment, the mutated PPO comprises a sequence of SEQ ID NO: 1, 2, 3, 4, 5, 6, 7, 8, 9, 10, 11, 12, 13, 14, 15, 16, 17, 18, 19, 20, 21, 22, 23, 24, 25, 26, 27, 28, 29, 30, 31, 32, 33, 34, 35, 36, 37, 38, 39, 40, 41, 42, 43, 44, 45, 46, 47, 48, 49, 50, 51, 52, 53, 54, 55, 56, 57, 58, 59, 60, 61, 62, 63, 64, 65, 66, 67, 68, 69, 70, 71, 72, 73, 74, 75, 76, 77, 78, 79, 80, 81, 82, 83, 84, 85, 86, 87, 88, 89, 90, 91, 92, 93, 94, 95, 96, 97, 98, 99, 100, 101, 102, 103, 104, 105, 106, 107, 108, 109, 110, 111, 112, 113, 114, 115, 116, 117, 577, 579, 581, 583, 585, 587, 589, 591, 593, 595, 597, 599, 601, 603, 605, 607, 609, 611, 613, 615, 617, 619, 621, 623, 625, 627, or 637, a variant, derivative, orthologue, paralogue or homologue thereof, in which: the amino acid at Mutated site 4 is Tyr, and the amino acid at Mutated site 5 is Lys.

[1177] In another preferred embodiment, the mutated PPO comprises a sequence of SEQ ID NO: 1, 2, 3, 4, 5, 6, 7, 8, 9, 10, 11, 12, 13, 14, 15, 16, 17, 18, 19, 20, 21, 22, 23, 24, 25, 26, 27, 28, 29, 30, 31, 32, 33, 34, 35, 36, 37, 38, 39, 40, 41, 42, 43, 44, 45, 46, 47, 48, 49, 50, 51, 52, 53, 54, 55, 56, 57, 58, 59, 60, 61, 62, 63, 64, 65, 66, 67, 68, 69, 70, 71, 72, 73, 74, 75, 76, 77, 78, 79, 80, 81, 82, 83, 84, 85, 86, 87, 88, 89, 90, 91, 92, 93, 94, 95, 96, 97, 98, 99, 100, 101, 102, 103, 104, 105, 106, 107, 108, 109, 110, 111, 112, 113, 114, 115, 116, 117, 577, 579, 581, 583, 585, 587, 589, 591, 593, 595, 597, 599, 601, 603, 605, 607, 609, 611, 613, 615, 617, 619, 621, 623, 625, 627, or 637, a variant, derivative, orthologue, paralogue or homologue thereof, in which: the amino acid at Mutated site 4 is Tyr, and the amino acid at Mutated site 5 is Asp.

[1178] In another preferred embodiment, the mutated PPO comprises a sequence of SEQ ID NO: 1, 2, 3, 4, 5, 6, 7, 8, 9, 10, 11, 12, 13, 14, 15, 16, 17, 18, 19, 20, 21, 22, 23, 24, 25, 26, 27, 28, 29, 30, 31, 32, 33, 34, 35, 36, 37, 38, 39, 40, 41, 42, 43, 44, 45, 46, 47, 48, 49, 50, 51, 52, 53, 54, 55, 56, 57, 58, 59, 60, 61, 62, 63, 64, 65, 66, 67, 68, 69, 70, 71, 72, 73, 74, 75, 76, 77, 78, 79, 80, 81, 82, 83, 84, 85, 86, 87, 88, 89, 90, 91, 92, 93, 94, 95, 96, 97, 98, 99, 100, 101, 102, 103, 104, 105, 106, 107, 108, 109, 110, 111, 112, 113, 114, 115, 116, 117, 577, 579, 581, 583, 585, 587, 589, 591, 593, 595, 597, 599, 601, 603, 605, 607, 609, 611, 613, 615, 617, 619, 621, 623, 625, 627, or 637, a variant, derivative, orthologue, paralogue or homologue thereof, in which: the amino acid at Mutated site 4 is Tyr, and the amino acid at Mutated site 5 is Glu.

[1179] In another preferred embodiment, the mutated PPO comprises a sequence of SEQ ID NO: 1, 2, 3, 4, 5, 6, 7, 8, 9, 10, 11, 12, 13, 14, 15, 16, 17, 18, 19, 20, 21, 22, 23, 24, 25, 26, 27, 28, 29, 30, 31, 32, 33, 34, 35, 36, 37, 38, 39, 40, 41, 42, 43, 44, 45, 46, 47, 48, 49, 50, 51, 52, 53, 54, 55, 56, 57, 58, 59, 60, 61, 62, 63, 64, 65, 66, 67, 68, 69, 70, 71, 72, 73, 74, 75, 76, 77, 78, 79, 80, 81, 82, 83, 84, 85, 86, 87, 88, 89, 90, 91, 92, 93, 94, 95, 96, 97, 98, 99, 100, 101, 102, 103, 104, 105, 106, 107, 108, 109, 110, 111, 112, 113, 114, 115, 116, 117, 577, 579, 581, 583, 585, 587, 589, 591, 593, 595, 597, 599, 601, 603, 605, 607, 609, 611, 613, 615, 617, 619, 621, 623, 625, 627, or 637, a variant, derivative, orthologue, paralogue or homologue thereof, in which: the amino acid at Mutated site 4 is Tyr, and the amino acid at Mutated site 5 is Ser.

[1180] In another preferred embodiment, the mutated PPO comprises a sequence of SEQ ID NO: 1, 2, 3, 4, 5, 6, 7, 8, 9, 10, 11, 12, 13, 14, 15, 16, 17, 18, 19, 20, 21, 22, 23, 24, 25, 26, 27, 28, 29, 30, 31, 32, 33, 34, 35, 36, 37, 38, 39, 40, 41, 42, 43, 44, 45, 46, 47, 48, 49, 50, 51, 52, 53, 54, 55, 56, 57, 58, 59, 60, 61, 62, 63, 64, 65, 66, 67, 68, 69, 70, 71, 72, 73, 74, 75, 76, 77, 78, 79, 80, 81, 82, 83, 84, 85, 86, 87, 88, 89, 90, 91, 92, 93, 94, 95, 96, 97, 98, 99, 100, 101, 102, 103, 104, 105, 106, 107, 108, 109, 110, 111, 112, 113, 114, 115, 116, 117, 577, 579, 581, 583, 585, 587, 589, 591, 593, 595, 597, 599, 601, 603, 605, 607, 609, 611, 613, 615, 617, 619, 621, 623, 625, 627, or 637, a variant, derivative, orthologue, paralogue or homologue thereof, in which: the amino acid at Mutated site 4 is Tyr, and the amino acid at Mutated site 5 is Thr.

[1181] In another preferred embodiment, the mutated PPO comprises a sequence of SEQ ID NO: 1, 2, 3, 4, 5, 6, 7, 8, 9, 10, 11, 12, 13, 14, 15, 16, 17, 18, 19, 20, 21, 22, 23, 24, 25, 26, 27, 28, 29, 30, 31, 32, 33, 34, 35, 36, 37, 38, 39, 40, 41, 42, 43, 44, 45, 46, 47, 48, 49, 50, 51, 52, 53, 54, 55, 56, 57, 58, 59, 60, 61, 62, 63, 64, 65, 66, 67, 68, 69, 70, 71, 72, 73, 74, 75, 76, 77, 78, 79, 80, 81, 82, 83, 84, 85, 86, 87, 88, 89, 90, 91, 92, 93, 94, 95, 96, 97, 98, 99, 100, 101, 102, 103, 104, 105, 106, 107, 108, 109, 110, 111, 112, 113, 114, 115, 116, 117, 577, 579, 581, 583, 585, 587, 589, 591, 593, 595, 597, 599, 601, 603, 605, 607, 609, 611, 613, 615, 617, 619, 621, 623, 625, 627, or 637, a variant, derivative, orthologue, paralogue or homologue thereof, in which: the amino acid at Mutated site 4 is Tyr, and the amino acid at Mutated site 5 is Asn.

[1182] In another preferred embodiment, the mutated PPO comprises a sequence of SEQ ID NO: 1, 2, 3, 4, 5, 6, 7, 8, 9, 10, 11, 12, 13, 14, 15, 16, 17, 18, 19, 20, 21, 22, 23, 24, 25, 26, 27, 28, 29, 30, 31, 32, 33, 34, 35, 36, 37, 38, 39, 40, 41, 42, 43, 44, 45, 46, 47, 48, 49, 50, 51, 52, 53, 54, 55, 56, 57, 58, 59, 60, 61, 62, 63, 64, 65, 66, 67, 68, 69, 70, 71, 72, 73, 74, 75, 76, 77, 78, 79, 80, 81, 82, 83, 84, 85, 86, 87, 88, 89, 90, 91, 92, 93, 94, 95, 96, 97, 98, 99, 100, 101, 102, 103, 104, 105, 106, 107, 108, 109, 110, 111, 112, 113, 114, 115, 116, 117, 577, 579, 581, 583, 585, 587, 589, 591, 593, 595, 597, 599, 601, 603, 605, 607, 609, 611, 613, 615, 617, 619, 621, 623, 625, 627, or 637, a variant, derivative, orthologue, paralogue or homologue thereof, in which: the amino acid at Mutated site 4 is Tyr, and the amino acid at Mutated site 5 is Gln.

[1183] In another preferred embodiment, the mutated PPO comprises a sequence of SEQ ID NO: 1, 2, 3, 4, 5, 6, 7, 8, 9, 10, 11, 12, 13, 14, 15, 16, 17, 18, 19, 20, 21, 22, 23, 24, 25, 26, 27, 28, 29, 30, 31, 32, 33, 34, 35, 36, 37, 38, 39, 40, 41, 42, 43, 44, 45, 46, 47, 48, 49, 50, 51, 52, 53, 54, 55, 56, 57, 58, 59, 60, 61, 62, 63, 64, 65, 66, 67, 68, 69, 70, 71, 72, 73, 74, 75, 76, 77, 78, 79, 80, 81, 82, 83, 84, 85, 86, 87, 88, 89, 90, 91, 92, 93, 94, 95, 96, 97, 98, 99, 100, 101, 102, 103, 104, 105, 106, 107, 108, 109, 110, 111, 112, 113, 114, 115, 116, 117, 577, 579, 581, 583, 585, 587, 589, 591, 593, 595, 597, 599, 601, 603, 605, 607, 609, 611, 613, 615, 617, 619, 621, 623, 625, 627, or 637, a variant, derivative, orthologue, paralogue or homologue thereof, in which: the amino acid at Mutated site 4 is Tyr, and the amino acid at Mutated site 5 is Cys.

[1184] In another preferred embodiment, the mutated PPO comprises a sequence of SEQ ID NO: 1, 2, 3, 4, 5, 6, 7, 8, 9, 10, 11, 12, 13, 14, 15, 16, 17, 18, 19, 20, 21, 22, 23, 24, 25, 26, 27, 28, 29, 30, 31, 32, 33, 34, 35, 36, 37, 38, 39, 40, 41, 42, 43, 44, 45, 46, 47, 48, 49, 50, 51, 52, 53, 54, 55, 56, 57, 58, 59, 60, 61, 62, 63, 64, 65, 66, 67, 68, 69, 70, 71, 72, 73, 74, 75, 76, 77, 78, 79, 80, 81, 82, 83, 84, 85, 86, 87, 88, 89, 90, 91, 92, 93, 94, 95, 96, 97, 98, 99, 100, 101, 102, 103, 104, 105, 106, 107, 108, 109, 110, 111, 112, 113, 114, 115, 116, 117, 577, 579, 581, 583, 585, 587, 589, 591, 593, 595, 597, 599, 601, 603, 605, 607, 609, 611, 613, 615, 617, 619, 621, 623, 625, 627, or 637, a variant, derivative, orthologue, paralogue or homologue thereof, in which: the amino acid at Mutated site 4 is Tyr, and the amino acid at Mutated site 5 is Gly.

[1185] In another preferred embodiment, the mutated PPO comprises a sequence of SEQ ID NO: 1, 2, 3, 4, 5, 6, 7, 8, 9, 10, 11, 12, 13, 14, 15, 16, 17, 18, 19, 20, 21, 22, 23, 24, 25, 26, 27, 28, 29, 30, 31, 32, 33, 34, 35, 36, 37, 38, 39, 40, 41, 42, 43, 44, 45, 46, 47, 48, 49, 50, 51, 52, 53, 54, 55, 56, 57, 58, 59, 60, 61, 62, 63, 64, 65, 66, 67, 68, 69, 70, 71, 72, 73, 74, 75, 76, 77, 78, 79, 80, 81, 82, 83, 84, 85, 86, 87, 88, 89, 90, 91, 92, 93, 94, 95, 96, 97, 98, 99, 100, 101, 102, 103, 104, 105, 106, 107, 108, 109, 110, 111, 112, 113, 114, 115, 116, 117, 577, 579, 581, 583, 585, 587, 589, 591, 593, 595, 597, 599, 601, 603, 605, 607, 609, 611, 613, 615, 617, 619, 621, 623, 625, 627, or 637, a variant, derivative, orthologue, paralogue or homologue thereof, in which: the amino acid at Mutated site 4 is Tyr, and the amino acid at Mutated site 5 is Pro.

[1186] In another preferred embodiment, the mutated PPO comprises a sequence of SEQ ID NO: 1, 2, 3, 4, 5, 6, 7, 8, 9, 10, 11, 12, 13, 14, 15, 16, 17, 18, 19, 20, 21, 22, 23, 24, 25, 26, 27, 28, 29, 30, 31, 32, 33, 34, 35, 36, 37, 38, 39, 40, 41, 42, 43, 44, 45, 46, 47, 48, 49, 50, 51, 52, 53, 54, 55, 56, 57, 58, 59, 60, 61, 62, 63, 64, 65, 66, 67, 68, 69, 70, 71, 72, 73, 74, 75, 76, 77, 78, 79, 80, 81, 82, 83, 84, 85, 86, 87, 88, 89, 90, 91, 92, 93, 94, 95, 96, 97, 98, 99, 100, 101, 102, 103, 104, 105, 106, 107, 108, 109, 110, 111, 112, 113, 114, 115, 116, 117, 577, 579, 581, 583, 585, 587, 589, 591, 593, 595, 597, 599, 601, 603, 605, 607, 609, 611, 613, 615, 617, 619, 621, 623, 625, 627, or 637, a variant, derivative, orthologue, paralogue or homologue thereof, in which: the amino acid at Mutated site 4 is Tyr, and the amino acid at Mutated site 5 is Arg.

[1187] In another preferred embodiment, the mutated PPO comprises a sequence of SEQ ID NO: 1, 2, 3, 4, 5, 6, 7, 8, 9, 10, 11, 12, 13, 14, 15, 16, 17, 18, 19, 20, 21, 22, 23, 24, 25, 26, 27, 28, 29, 30, 31, 32, 33, 34, 35, 36, 37, 38, 39, 40, 41, 42, 43, 44, 45, 46, 47, 48, 49, 50, 51, 52, 53, 54, 55, 56, 57, 58, 59, 60, 61, 62, 63, 64, 65, 66, 67, 68, 69, 70, 71, 72, 73, 74, 75, 76, 77, 78, 79, 80, 81, 82, 83, 84, 85, 86, 87, 88, 89, 90, 91, 92, 93, 94, 95, 96, 97, 98, 99, 100, 101, 102, 103, 104, 105, 106, 107, 108, 109, 110, 111, 112, 113, 114, 115, 116, 117, 577, 579, 581, 583, 585, 587, 589, 591, 593, 595, 597, 599, 601, 603, 605, 607, 609, 611, 613, 615, 617, 619, 621, 623, 625, 627, or 637, a variant, derivative, orthologue, paralogue or homologue thereof, in which: the amino acid at Mutated site 4 is Tyr, and the amino acid at Mutated site 5 is Tyr.

[1188] In another preferred embodiment, the mutated PPO comprises a sequence of SEQ ID NO: 1, 2, 3, 4, 5, 6, 7, 8, 9, 10, 11, 12, 13, 14, 15, 16, 17, 18, 19, 20, 21, 22, 23, 24, 25, 26, 27, 28, 29, 30, 31, 32, 33, 34, 35, 36, 37, 38, 39, 40, 41, 42, 43, 44, 45, 46, 47, 48, 49, 50, 51, 52, 53, 54, 55, 56, 57, 58, 59, 60, 61, 62, 63, 64, 65, 66, 67, 68, 69, 70, 71, 72, 73, 74, 75, 76, 77, 78, 79, 80, 81, 82, 83, 84, 85, 86, 87, 88, 89, 90, 91, 92, 93, 94, 95, 96, 97, 98, 99, 100, 101, 102, 103, 104, 105, 106, 107, 108, 109, 110, 111, 112, 113, 114, 115, 116, 117, 577, 579, 581, 583, 585, 587, 589, 591, 593, 595, 597, 599, 601, 603, 605, 607, 609, 611, 613, 615, 617, 619, 621, 623, 625, 627, or 637, a variant, derivative, orthologue, paralogue or homologue thereof, in which: the amino acid at Mutated site 4 is Tyr, and the amino acid at Mutated site 5 is Trp.

[1189] In another preferred embodiment, the mutated PPO comprises a sequence of SEQ ID NO: 1, 2, 3, 4, 5, 6, 7, 8, 9, 10, 11, 12, 13, 14, 15, 16, 17, 18, 19, 20, 21, 22, 23, 24, 25, 26, 27, 28, 29, 30, 31, 32, 33, 34, 35, 36, 37, 38, 39, 40, 41, 42, 43, 44, 45, 46, 47, 48, 49, 50, 51, 52, 53, 54, 55, 56, 57, 58, 59, 60, 61, 62, 63, 64, 65, 66, 67, 68, 69, 70, 71, 72, 73, 74, 75, 76, 77, 78, 79, 80, 81, 82, 83, 84, 85, 86, 87, 88, 89, 90, 91, 92, 93, 94, 95, 96, 97, 98, 99, 100, 101, 102, 103, 104, 105, 106, 107, 108, 109, 110, 111, 112, 113, 114, 115, 116, 117, 577, 579, 581, 583, 585, 587, 589, 591, 593, 595, 597, 599, 601, 603, 605, 607, 609, 611, 613, 615, 617, 619, 621, 623, 625, 627, or 637, a variant, derivative, orthologue, paralogue or homologue thereof, in which: the amino acid at Mutated site 4 is Trp, and the amino acid at Mutated site 5 is Ala.

[1190] In another preferred embodiment, the mutated PPO comprises a sequence of SEQ ID NO: 1, 2, 3, 4, 5, 6, 7, 8, 9, 10, 11, 12, 13, 14, 15, 16, 17, 18, 19, 20, 21, 22, 23, 24, 25, 26, 27, 28, 29, 30, 31, 32, 33, 34, 35, 36, 37, 38, 39, 40, 41, 42, 43, 44, 45, 46, 47, 48, 49, 50, 51, 52, 53, 54, 55, 56, 57, 58, 59, 60, 61, 62, 63, 64, 65, 66, 67, 68, 69, 70, 71, 72, 73, 74, 75, 76, 77, 78, 79, 80, 81, 82, 83, 84, 85, 86, 87, 88, 89, 90, 91, 92, 93, 94, 95, 96, 97, 98, 99, 100, 101, 102, 103, 104, 105, 106, 107, 108, 109, 110, 111, 112, 113, 114, 115, 116, 117, 577, 579, 581, 583, 585, 587, 589, 591, 593, 595, 597, 599, 601, 603, 605, 607, 609, 611, 613, 615, 617, 619, 621, 623, 625, 627, or 637, a variant, derivative, orthologue, paralogue or homologue thereof, in which: the amino acid at Mutated site 4 is Trp, and the amino acid at Mutated site 5 is Leu.

[1191] In another preferred embodiment, the mutated PPO comprises a sequence of SEQ ID NO: 1, 2, 3, 4, 5, 6, 7, 8, 9, 10, 11, 12, 13, 14, 15, 16, 17, 18, 19, 20, 21, 22, 23, 24, 25, 26, 27, 28, 29, 30, 31, 32, 33, 34, 35, 36, 37, 38, 39, 40, 41, 42, 43, 44, 45, 46, 47, 48, 49, 50, 51, 52, 53, 54, 55, 56, 57, 58, 59, 60, 61, 62, 63, 64, 65, 66, 67, 68, 69, 70, 71, 72, 73, 74, 75, 76, 77, 78, 79, 80, 81, 82, 83, 84, 85, 86, 87, 88, 89, 90, 91, 92, 93, 94, 95, 96, 97, 98, 99, 100, 101, 102, 103, 104, 105, 106, 107, 108, 109, 110, 111, 112, 113, 114, 115, 116, 117, 577, 579, 581, 583, 585, 587, 589, 591, 593, 595, 597, 599, 601, 603, 605, 607, 609, 611, 613, 615, 617, 619, 621, 623, 625, 627, or 637, a variant, derivative, orthologue, paralogue or homologue thereof, in which: the amino acid at Mutated site 4 is Trp, and the amino acid at Mutated site 5 is Val.

[1192] In another preferred embodiment, the mutated PPO comprises a sequence of SEQ ID NO: 1, 2, 3, 4, 5, 6, 7, 8, 9, 10, 11, 12, 13, 14, 15, 16, 17, 18, 19, 20, 21, 22, 23, 24, 25, 26, 27, 28, 29, 30, 31, 32, 33, 34, 35, 36, 37, 38, 39, 40, 41, 42, 43, 44, 45, 46, 47, 48, 49, 50, 51, 52, 53, 54, 55, 56, 57, 58, 59, 60, 61, 62, 63, 64, 65, 66, 67, 68, 69, 70, 71, 72, 73, 74, 75, 76, 77, 78, 79, 80, 81, 82, 83, 84, 85, 86, 87, 88, 89, 90, 91, 92, 93, 94, 95, 96, 97, 98, 99, 100, 101, 102, 103, 104, 105, 106, 107, 108, 109, 110, 111, 112, 113, 114, 115, 116, 117, 577, 579, 581, 583, 585, 587, 589, 591, 593, 595, 597, 599, 601, 603, 605, 607, 609, 611, 613, 615, 617, 619, 621, 623, 625, 627, or 637, a variant, derivative, orthologue, paralogue or homologue thereof, in which: the amino acid at Mutated site 4 is Trp, and the amino acid at Mutated site 5 is Ile.

[1193] In another preferred embodiment, the mutated PPO comprises a sequence of SEQ ID NO: 1, 2, 3, 4, 5, 6, 7, 8, 9, 10, 11, 12, 13, 14, 15, 16, 17, 18, 19, 20, 21, 22, 23, 24, 25, 26, 27, 28, 29, 30, 31, 32, 33, 34, 35, 36, 37, 38, 39, 40, 41, 42, 43, 44, 45, 46, 47, 48, 49, 50, 51, 52, 53, 54, 55, 56, 57, 58, 59, 60, 61, 62, 63, 64, 65, 66, 67, 68, 69, 70, 71, 72, 73, 74, 75, 76, 77, 78, 79, 80, 81, 82, 83, 84, 85, 86, 87, 88, 89, 90, 91, 92, 93, 94, 95, 96, 97, 98, 99, 100, 101, 102, 103, 104, 105, 106, 107, 108, 109, 110, 111, 112, 113, 114, 115, 116, 117, 577, 579, 581, 583, 585, 587, 589, 591, 593, 595, 597, 599, 601, 603, 605, 607, 609, 611, 613, 615, 617, 619, 621, 623, 625, 627, or 637, a variant, derivative, orthologue, paralogue or homologue thereof, in which: the amino acid at Mutated site 4 is Trp, and the amino acid at Mutated site 5 is Met.

[1194] In another preferred embodiment, the mutated PPO comprises a sequence of SEQ ID NO: 1, 2, 3, 4, 5, 6, 7, 8, 9, 10, 11, 12, 13, 14, 15, 16, 17, 18, 19, 20, 21, 22, 23, 24, 25, 26, 27, 28, 29, 30, 31, 32, 33, 34, 35, 36, 37, 38, 39, 40, 41, 42, 43, 44, 45, 46, 47, 48, 49, 50, 51, 52, 53, 54, 55, 56, 57, 58, 59, 60, 61, 62, 63, 64, 65, 66, 67, 68, 69, 70, 71, 72, 73, 74, 75, 76, 77, 78, 79, 80, 81, 82, 83, 84, 85, 86, 87, 88, 89, 90, 91, 92, 93, 94, 95, 96, 97, 98, 99, 100, 101, 102, 103, 104, 105, 106, 107, 108, 109, 110, 111, 112, 113, 114, 115, 116, 117, 577, 579, 581, 583, 585, 587, 589, 591, 593, 595, 597, 599, 601, 603, 605, 607, 609, 611, 613, 615, 617, 619, 621, 623, 625, 627, or 637, a variant, derivative, orthologue, paralogue or homologue thereof, in which: the amino acid at Mutated site 4 is Trp, and the amino acid at Mutated site 5 is His.

[1195] In another preferred embodiment, the mutated PPO comprises a sequence of SEQ ID NO: 1, 2, 3, 4, 5, 6, 7, 8, 9, 10, 11, 12, 13, 14, 15, 16, 17, 18, 19, 20, 21, 22, 23, 24, 25, 26, 27, 28, 29, 30, 31, 32, 33, 34, 35, 36, 37, 38, 39, 40, 41, 42, 43, 44, 45, 46, 47, 48, 49, 50, 51, 52, 53, 54, 55, 56, 57, 58, 59, 60, 61, 62, 63, 64, 65, 66, 67, 68, 69, 70, 71, 72, 73, 74, 75, 76, 77, 78, 79, 80, 81, 82, 83, 84, 85, 86, 87, 88, 89, 90, 91, 92, 93, 94, 95, 96, 97, 98, 99, 100, 101, 102, 103, 104, 105, 106, 107, 108, 109, 110, 111, 112, 113, 114, 115, 116, 117, 577, 579, 581, 583, 585, 587, 589, 591, 593, 595, 597, 599, 601,603, 605, 607, 609, 611,613, 615, 617, 619, 621,623, 625, 627, or 637, a variant, derivative, orthologue, paralogue or homologue thereof, in which: the amino acid at Mutated site 4 is Trp, and the amino acid at Mutated site 5 is Lys.

[1196] In another preferred embodiment, the mutated PPO comprises a sequence of SEQ ID NO: 1, 2, 3, 4, 5, 6, 7, 8, 9, 10, 11, 12, 13, 14, 15, 16, 17, 18, 19, 20, 21, 22, 23, 24, 25, 26, 27, 28, 29, 30, 31, 32, 33, 34, 35, 36, 37, 38, 39, 40, 41, 42, 43, 44, 45, 46, 47, 48, 49, 50, 51, 52, 53, 54, 55, 56, 57, 58, 59, 60, 61, 62, 63, 64, 65, 66, 67, 68, 69, 70, 71, 72, 73, 74, 75, 76, 77, 78, 79, 80, 81, 82, 83, 84, 85, 86, 87, 88, 89, 90, 91, 92, 93, 94, 95, 96, 97, 98, 99, 100, 101, 102, 103, 104, 105, 106, 107, 108, 109, 110, 111, 112, 113, 114, 115, 116, 117, 577, 579, 581, 583, 585, 587, 589, 591, 593, 595, 597, 599, 601, 603, 605, 607, 609, 611, 613, 615, 617, 619, 621, 623, 625, 627, or 637, a variant, derivative, orthologue, paralogue or homologue thereof, in which: the amino acid at Mutated site 4 is Trp, and the amino acid at Mutated site 5 is Asp.

[1197] In another preferred embodiment, the mutated PPO comprises a sequence of SEQ ID NO: 1, 2, 3, 4, 5, 6, 7, 8, 9, 10, 11, 12, 13, 14, 15, 16, 17, 18, 19, 20, 21, 22, 23, 24, 25, 26, 27, 28, 29, 30, 31, 32, 33, 34, 35, 36, 37, 38, 39, 40, 41, 42, 43, 44, 45, 46, 47, 48, 49, 50, 51, 52, 53, 54, 55, 56, 57, 58, 59, 60, 61, 62, 63, 64, 65, 66, 67, 68, 69, 70, 71, 72, 73, 74, 75, 76, 77, 78, 79, 80, 81, 82, 83, 84, 85, 86, 87, 88, 89, 90, 91, 92, 93, 94, 95, 96, 97, 98, 99, 100, 101, 102, 103, 104, 105, 106, 107, 108, 109, 110, 111, 112, 113, 114, 115, 116, 117, 577, 579, 581, 583, 585, 587, 589, 591, 593, 595, 597, 599, 601, 603, 605, 607, 609, 611, 613, 615, 617, 619, 621, 623, 625, 627, or 637, a variant, derivative, orthologue, paralogue or homologue thereof, in which: the amino acid at Mutated site 4 is Trp, and the amino acid at Mutated site 5 is Glu.

[1198] In another preferred embodiment, the mutated PPO comprises a sequence of SEQ ID NO: 1, 2, 3, 4, 5, 6, 7, 8, 9, 10, 11, 12, 13, 14, 15, 16, 17, 18, 19, 20, 21, 22, 23, 24, 25, 26, 27, 28, 29, 30, 31, 32, 33, 34, 35, 36, 37, 38, 39, 40, 41, 42, 43, 44, 45, 46, 47, 48, 49, 50, 51, 52, 53, 54, 55, 56, 57, 58, 59, 60, 61, 62, 63, 64, 65, 66, 67, 68, 69, 70, 71, 72, 73, 74, 75, 76, 77, 78, 79, 80, 81, 82, 83, 84, 85, 86, 87, 88, 89, 90, 91, 92, 93, 94, 95, 96, 97, 98, 99, 100, 101, 102, 103, 104, 105, 106, 107, 108, 109, 110, 111, 112, 113, 114, 115, 116, 117, 577, 579, 581, 583, 585, 587, 589, 591, 593, 595, 597, 599, 601, 603, 605, 607, 609, 611, 613, 615, 617, 619, 621, 623, 625, 627, or 637, a variant, derivative, orthologue, paralogue or homologue thereof, in which: the amino acid at Mutated site 4 is Trp, and the amino acid at Mutated site 5 is Ser.

[1199] In another preferred embodiment, the mutated PPO comprises a sequence of SEQ ID NO: 1, 2, 3, 4, 5, 6, 7, 8, 9, 10, 11, 12, 13, 14, 15, 16, 17, 18, 19, 20, 21, 22, 23, 24, 25, 26, 27, 28, 29, 30, 31, 32, 33, 34, 35, 36, 37, 38, 39, 40, 41, 42, 43, 44, 45, 46, 47, 48, 49, 50, 51, 52, 53, 54, 55, 56, 57, 58, 59, 60, 61, 62, 63, 64, 65, 66, 67, 68, 69, 70, 71, 72, 73, 74, 75, 76, 77, 78, 79, 80, 81, 82, 83, 84, 85, 86, 87, 88, 89, 90, 91, 92, 93, 94, 95, 96, 97, 98, 99, 100, 101, 102, 103, 104, 105, 106, 107, 108, 109, 110, 111, 112, 113, 114, 115, 116, 117, 577, 579, 581, 583, 585, 587, 589, 591, 593, 595, 597, 599, 601, 603, 605, 607, 609, 611, 613, 615, 617, 619, 621, 623, 625, 627, or 637, a variant, derivative, orthologue, paralogue or homologue thereof, in which: the amino acid at Mutated site 4 is Trp, and the amino acid at Mutated site 5 is Thr.

[1200] In another preferred embodiment, the mutated PPO comprises a sequence of SEQ ID NO: 1, 2, 3, 4, 5, 6, 7, 8, 9, 10, 11, 12, 13, 14, 15, 16, 17, 18, 19, 20, 21, 22, 23, 24, 25, 26, 27, 28, 29, 30, 31, 32, 33, 34, 35, 36, 37, 38, 39, 40, 41, 42, 43, 44, 45, 46, 47, 48, 49, 50, 51, 52, 53, 54, 55, 56, 57, 58, 59, 60, 61, 62, 63, 64, 65, 66, 67, 68, 69, 70, 71, 72, 73, 74, 75, 76, 77, 78, 79, 80, 81, 82, 83, 84, 85, 86, 87, 88, 89, 90, 91, 92, 93, 94, 95, 96, 97, 98, 99, 100, 101, 102, 103, 104, 105, 106, 107, 108, 109, 110, 111, 112, 113, 114, 115, 116, 117, 577, 579, 581, 583, 585, 587, 589, 591, 593, 595, 597, 599, 601, 603, 605, 607, 609, 611, 613, 615, 617, 619, 621, 623, 625, 627, or 637, a variant, derivative, orthologue, paralogue or homologue thereof, in which: the amino acid at Mutated site 4 is Trp, and the amino acid at Mutated site 5 is Asn.

[1201] In another preferred embodiment, the mutated PPO comprises a sequence of SEQ ID NO: 1, 2, 3, 4, 5, 6, 7, 8, 9, 10, 11, 12, 13, 14, 15, 16, 17, 18, 19, 20, 21, 22, 23, 24, 25, 26, 27, 28, 29, 30, 31, 32, 33, 34, 35, 36, 37, 38, 39, 40, 41, 42, 43, 44, 45, 46, 47, 48, 49, 50, 51, 52, 53, 54, 55, 56, 57, 58, 59, 60, 61, 62, 63, 64, 65, 66, 67, 68, 69, 70, 71, 72, 73, 74, 75, 76, 77, 78, 79, 80, 81, 82, 83, 84, 85, 86, 87, 88, 89, 90, 91, 92, 93, 94, 95, 96, 97, 98, 99, 100, 101, 102, 103, 104, 105, 106, 107, 108, 109, 110, 111, 112, 113, 114, 115, 116, 117, 577, 579, 581, 583, 585, 587, 589, 591, 593, 595, 597, 599, 601, 603, 605, 607, 609, 611, 613, 615, 617, 619, 621, 623, 625, 627, or 637, a variant, derivative, orthologue, paralogue or homologue thereof, in which: the amino acid at Mutated site 4 is Trp, and the amino acid at Mutated site 5 is Gln.

[1202] In another preferred embodiment, the mutated PPO comprises a sequence of SEQ ID NO: 1, 2, 3, 4, 5, 6, 7, 8, 9, 10, 11, 12, 13, 14, 15, 16, 17, 18, 19, 20, 21, 22, 23, 24, 25, 26, 27, 28, 29, 30, 31, 32, 33, 34, 35, 36, 37, 38, 39, 40, 41, 42, 43, 44, 45, 46, 47, 48, 49, 50, 51, 52, 53, 54, 55, 56, 57, 58, 59, 60, 61, 62, 63, 64, 65, 66, 67, 68, 69, 70, 71, 72, 73, 74, 75, 76, 77, 78, 79, 80, 81, 82, 83, 84, 85, 86, 87, 88, 89, 90, 91, 92, 93, 94, 95, 96, 97, 98, 99, 100, 101, 102, 103, 104, 105, 106, 107, 108, 109, 110, 111, 112, 113, 114, 115, 116, 117, 577, 579, 581, 583, 585, 587, 589, 591, 593, 595, 597, 599, 601, 603, 605, 607, 609, 611, 613, 615, 617, 619, 621, 623, 625, 627, or 637, a variant, derivative, orthologue, paralogue or homologue thereof, in which: the amino acid at Mutated site 4 is Trp, and the amino acid at Mutated site 5 is Cys.

[1203] In another preferred embodiment, the mutated PPO comprises a sequence of SEQ ID NO: 1, 2, 3, 4, 5, 6, 7, 8, 9, 10, 11, 12, 13, 14, 15, 16, 17, 18, 19, 20, 21, 22, 23, 24, 25, 26, 27, 28, 29, 30, 31, 32, 33, 34, 35, 36, 37, 38, 39, 40, 41, 42, 43, 44, 45, 46, 47, 48, 49, 50, 51, 52, 53, 54, 55, 56, 57, 58, 59, 60, 61, 62, 63, 64, 65, 66, 67, 68, 69, 70, 71, 72, 73, 74, 75, 76, 77, 78, 79, 80, 81, 82, 83, 84, 85, 86, 87, 88, 89, 90, 91, 92, 93, 94, 95, 96, 97, 98, 99, 100, 101, 102, 103, 104, 105, 106, 107, 108, 109, 110, 111, 112, 113, 114, 115, 116, 117, 577, 579, 581, 583, 585, 587, 589, 591, 593, 595, 597, 599, 601, 603, 605, 607, 609, 611, 613, 615, 617, 619, 621, 623, 625, 627, or 637, a variant, derivative, orthologue, paralogue or homologue thereof, in which: the amino acid at Mutated site 4 is Trp, and the amino acid at Mutated site 5 is Gly.

[1204] In another preferred embodiment, the mutated PPO comprises a sequence of SEQ ID NO: 1, 2, 3, 4, 5, 6, 7, 8, 9, 10, 11, 12, 13, 14, 15, 16, 17, 18, 19, 20, 21, 22, 23, 24, 25, 26, 27, 28, 29, 30, 31, 32, 33, 34, 35, 36, 37, 38, 39, 40, 41, 42, 43, 44, 45, 46, 47, 48, 49, 50, 51, 52, 53, 54, 55, 56, 57, 58, 59, 60, 61, 62, 63, 64, 65, 66, 67, 68, 69, 70, 71, 72, 73, 74, 75, 76, 77, 78, 79, 80, 81, 82, 83, 84, 85, 86, 87, 88, 89, 90, 91, 92, 93, 94, 95, 96, 97, 98, 99, 100, 101, 102, 103, 104, 105, 106, 107, 108, 109, 110, 111, 112, 113, 114, 115, 116, 117, 577, 579, 581, 583, 585, 587, 589, 591, 593, 595, 597, 599, 601,603, 605, 607, 609, 611,613, 615, 617, 619, 621,623, 625, 627, or 637, a variant, derivative, orthologue, paralogue or homologue thereof, in which: the amino acid at Mutated site 4 is Trp, and the amino acid at Mutated site 5 is Pro.

[1205] In another preferred embodiment, the mutated PPO comprises a sequence of SEQ ID NO: 1, 2, 3, 4, 5, 6, 7, 8, 9, 10, 11, 12, 13, 14, 15, 16, 17, 18, 19, 20, 21, 22, 23, 24, 25, 26, 27, 28, 29, 30, 31, 32, 33, 34, 35, 36, 37, 38, 39, 40, 41, 42, 43, 44, 45, 46, 47, 48, 49, 50, 51, 52, 53, 54, 55, 56, 57, 58, 59, 60, 61, 62, 63, 64, 65, 66, 67, 68, 69, 70, 71, 72, 73, 74, 75, 76, 77, 78, 79, 80, 81, 82, 83, 84, 85, 86, 87, 88, 89, 90, 91, 92, 93, 94, 95, 96, 97, 98, 99, 100, 101, 102, 103, 104, 105, 106, 107, 108, 109, 110, 111, 112, 113, 114, 115, 116, 117, 577, 579, 581, 583, 585, 587, 589, 591, 593, 595, 597, 599, 601, 603, 605, 607, 609, 611, 613, 615, 617, 619, 621, 623, 625, 627, or 637, a variant, derivative, orthologue, paralogue or homologue thereof, in which: the amino acid at Mutated site 4 is Trp, and the amino acid at Mutated site 5 is Arg.

[1206] In another preferred embodiment, the mutated PPO comprises a sequence of SEQ ID NO: 1, 2, 3, 4, 5, 6, 7, 8, 9, 10, 11, 12, 13, 14, 15, 16, 17, 18, 19, 20, 21, 22, 23, 24, 25, 26, 27, 28, 29, 30, 31, 32, 33, 34, 35, 36, 37, 38, 39, 40, 41, 42, 43, 44, 45, 46, 47, 48, 49, 50, 51, 52, 53, 54, 55, 56, 57, 58, 59, 60, 61, 62, 63, 64, 65, 66, 67, 68, 69, 70, 71, 72, 73, 74, 75, 76, 77, 78, 79, 80, 81, 82, 83, 84, 85, 86, 87, 88, 89, 90, 91, 92, 93, 94, 95, 96, 97, 98, 99, 100, 101, 102, 103, 104, 105, 106, 107, 108, 109, 110, 111, 112, 113, 114, 115, 116, 117, 577, 579, 581, 583, 585, 587, 589, 591, 593, 595, 597, 599, 601, 603, 605, 607, 609, 611, 613, 615, 617, 619, 621, 623, 625, 627, or 637, a variant, derivative, orthologue, paralogue or homologue thereof, in which: the amino acid at Mutated site 4 is Trp, and the amino acid at Mutated site 5 is Tyr.

[1207] In another preferred embodiment, the mutated PPO comprises a sequence of SEQ ID NO: 1, 2, 3, 4, 5, 6, 7, 8, 9, 10, 11, 12, 13, 14, 15, 16, 17, 18, 19, 20, 21, 22, 23, 24, 25, 26, 27, 28, 29, 30, 31, 32, 33, 34, 35, 36, 37, 38, 39, 40, 41, 42, 43, 44, 45, 46, 47, 48, 49, 50, 51, 52, 53, 54, 55, 56, 57, 58, 59, 60, 61, 62, 63, 64, 65, 66, 67, 68, 69, 70, 71, 72, 73, 74, 75, 76, 77, 78, 79, 80, 81, 82, 83, 84, 85, 86, 87, 88, 89, 90, 91, 92, 93, 94, 95, 96, 97, 98, 99, 100, 101, 102, 103, 104, 105, 106, 107, 108, 109, 110, 111, 112, 113, 114, 115, 116, 117, 577, 579, 581, 583, 585, 587, 589, 591, 593, 595, 597, 599, 601, 603, 605, 607, 609, 611, 613, 615, 617, 619, 621, 623, 625, 627, or 637, a variant, derivative, orthologue, paralogue or homologue thereof, in which: the amino acid at Mutated site 4 is Trp, and the amino acid at Mutated site 5 is Trp.

[1208] In another preferred embodiment, the mutated PPO comprises a sequence of SEQ ID NO: 1, 2, 3, 4, 5, 6, 7, 8, 9, 10, 11, 12, 13, 14, 15, 16, 17, 18, 19, 20, 21, 22, 23, 24, 25, 26, 27, 28, 29, 30, 31, 32, 33, 34, 35, 36, 37, 38, 39, 40, 41, 42, 43, 44, 45, 46, 47, 48, 49, 50, 51, 52, 53, 54, 55, 56, 57, 58, 59, 60, 61, 62, 63, 64, 65, 66, 67, 68, 69, 70, 71, 72, 73, 74, 75, 76, 77, 78, 79, 80, 81, 82, 83, 84, 85, 86, 87, 88, 89, 90, 91, 92, 93, 94, 95, 96, 97, 98, 99, 100, 101, 102, 103, 104, 105, 106, 107, 108, 109, 110, 111, 112, 113, 114, 115, 116, 117, 577, 579, 581, 583, 585, 587, 589, 591, 593, 595, 597, 599, 601,603, 605, 607, 609, 611,613, 615, 617, 619, 621,623, 625, 627, or 637, a variant, derivative, orthologue, paralogue or homologue thereof, in which: the amino acid at Mutated site 3 is other than Gly, is preferably Arg.

[1209] In another preferred embodiment, the mutated PPO comprises a sequence of SEQ ID NO: 1, 2, 3, 4, 5, 6, 7, 8, 9, 10, 11, 12, 13, 14, 15, 16, 17, 18, 19, 20, 21, 22, 23, 24, 25, 26, 27, 28, 29, 30, 31, 32, 33, 34, 35, 36, 37, 38, 39, 40, 41, 42, 43, 44, 45, 46, 47, 48, 49, 50, 51, 52, 53, 54, 55, 56, 57, 58, 59, 60, 61, 62, 63, 64, 65, 66, 67, 68, 69, 70, 71, 72, 73, 74, 75, 76, 77, 78, 79, 80, 81, 82, 83, 84, 85, 86, 87, 88, 89, 90, 91, 92, 93, 94, 95, 96, 97, 98, 99, 100, 101, 102, 103, 104, 105, 106, 107, 108, 109, 110, 111, 112, 113, 114, 115, 116, 117, 577, 579, 581, 583, 585, 587, 589, 591, 593, 595, 597, 599, 601, 603, 605, 607, 609, 611, 613, 615, 617, 619, 621, 623, 625, 627, or 637, a variant, derivative, orthologue, paralogue or homologue thereof, in which: the amino acid at Mutated site 6 is other than Gly, is preferably Ala.

[1210] In another preferred embodiment, the mutated PPO comprises a sequence of SEQ ID NO: 1, 2, 3, 4, 5, 6, 7, 8, 9, 10, 11, 12, 13, 14, 15, 16, 17, 18, 19, 20, 21, 22, 23, 24, 25, 26, 27, 28, 29, 30, 31, 32, 33, 34, 35, 36, 37, 38, 39, 40, 41, 42, 43, 44, 45, 46, 47, 48, 49, 50, 51, 52, 53, 54, 55, 56, 57, 58, 59, 60, 61, 62, 63, 64, 65, 66, 67, 68, 69, 70, 71, 72, 73, 74, 75, 76, 77, 78, 79, 80, 81, 82, 83, 84, 85, 86, 87, 88, 89, 90, 91, 92, 93, 94, 95, 96, 97, 98, 99, 100, 101, 102, 103, 104, 105, 106, 107, 108, 109, 110, 111, 112, 113, 114, 115, 116, 117, 577, 579, 581, 583, 585, 587, 589, 591, 593, 595, 597, 599, 601, 603, 605, 607, 609, 611, 613, 615, 617, 619, 621, 623, 625, 627, or 637, a variant, derivative, orthologue, paralogue or homologue thereof, in which: the amino acid at Mutated site 7 is other than Leu, is preferably Phe.

[1211] It will be within the knowledge of the skilled artisan to identify conserved regions and motifs shared between the homologues, orthologues and paralogues of PPO polypeptides comprising SEQ ID NO: 1, 2, 3, 4, 5, 6, 7, 8, 9, 10, 11, 12, 13, 14, 15, 16, 17, 18, 19, 20, 21, 22, 23, 24, 25, 26, 27, 28, 29, 30, 31, 32, 33, 34, 35, 36, 37, 38, 39, 40, 41, 42, 43, 44, 45, 46, 47, 48, 49, 50, 51, 52, 53, 54, 55, 56, 57, 58, 59, 60, 61, 62, 63, 64, 65, 66, 67, 68, 69, 70, 71, 72, 73, 74, 75, 76, 77, 78, 79, 80, 81, 82, 83, 84, 85, 86, 87, 88, 89, 90, 91, 92, 93, 94, 95, 96, 97, 98, 99, 100, 101, 102, 103, 104, 105, 106, 107, 108, 109, 110, 111, 112, 113, 114, 115, 116, 117, 577, 579, 581, 583, 585, 587, 589, 591, 593, 595, 597, 599, 601, 603, 605, 607, 609, 611, 613, 615, 617, 619, 621, 623, 625, 627, or 637. Having identified such conserved regions that may represent suitable binding motifs, amino acids corresponding to the amino acids listed in Table 2a and 2b can be chosen to be substituted by any other amino acid, preferably by the amino acids listed under mutated sites 1, 2, 3, 4, or 5.

[1212] Accordingly, preferred motifs shared between the homologues, orthologues and paralogues of PPO polypeptides described above are Motif 1: SQ[N/K/H]KRYI, wherein the Arg at position 5 within said motif is substituted by Leu, Ala, Val, lie, Met, Tyr, Gly, Asn, Cys, Phe, Ser, Thr, Gln, or His; Motif 2: TLGTLFSS, wherein the Leu at position 2 within said motif is substituted by Ala, Arg, Val, lie, Met, His, Lys, Asp, Glu, Ser, Thr, Asn, Gln, Cys, Gly, Pro, Phe, Tyr, or Trp; and/or wherein the Gly at position 3 within said motif is substituted by Ala, Arg, Val, lie, Met, His, Lys, Asp, Glu, Ser, Thr, Asn, Gln, Cys, Leu, Pro, Phe, Tyr, or Trp; and/or wherein the Leu at position 5 within said motif is substituted by Ala, Arg, Val, lie, Met, His, Lys, Asp, Glu, Ser, Thr, Asn, Gln, Cys, Gly, Pro, Phe, Tyr, or Trp; Motif 3: [F/Y]TTF[V/I]GG, wherein the Phe at position 4 within said motif is substituted by Ala, Leu, Val, lie, Met, His, Lys, Asp, Glu, Ser, Thr, Asn, Gln, Cys, Gly, Pro, Arg, Tyr, or Trp.

[1213] Further examples of such homologues, orthologues and paralogues are PPO polypeptides comprising the amino acid sequence of SEQ ID NO: 577, 579, 581, 583, 585, 587, 589, 591, 593, 595, 597, 599, 601, 603, 605, 607, 609, 611, 613, 615, 617, 619, 621, 623, 625, 627, or 637.

[1214] In addition, the present invention refers to a method for identifying a phenyluracil herbicide by using a herbicide tolerant PPO polypeptide as defined SUPRA.

[1215] Said method comprises the steps of:
[1216] a) generating a transgenic cell or plant comprising a nucleic acid encoding a mutated PPO, wherein the mutated PPO is expressed;
[1217] b) applying a phenyluracil herbicide to the transgenic cell or plant of a) and to a control cell or plant of the same variety;
[1218] c) determining the growth or the viability of the transgenic cell or plant and the control cell or plant after application of said phenyluracil herbicide, and
[1219] d) selecting “phenyluracil herbicides” which confer reduced growth to the control cell or plant as compared to the growth of the transgenic cell or plant.

[1220] By “control cell” or “similar, wild-type, plant, plant tissue, plant cell or host cell” is intended a plant, plant tissue, plant cell, or host cell, respectively, that lacks the herbicide-resistance characteristics and/or particular polynucleotide of the invention that are disclosed herein. The use of the term “wild-type” is not, therefore, intended to imply that a plant, plant tissue, plant cell, or other host cell lacks recombinant DNA in its genome, and/or does not possess herbicide-resistant characteristics that are different from those disclosed herein.

[1221] Another object refers to a method of identifying a nucleotide sequence encoding a mutated PPO which is resistant or tolerant to a phenyluracil herbicide, the method comprising:
[1222] a) generating a library of mutated PPO-encoding nucleic acids,
[1223] b) screening a population of the resulting mutated PPO-encoding nucleic acids by expressing each of said nucleic acids in a cell or plant and treating said cell or plant with a phenyluracil herbicide,
[1224] c) comparing the phenyluracil herbicide-tolerance levels provided by said population of mutated PPO encoding nucleic acids with the phenyluracil herbicide-tolerance level provided by a control PPO-encoding nucleic acid,
[1225] d) selecting at least one mutated PPO-encoding nucleic acid that provides a significantly increased level of tolerance to a phenyluracil herbicide as compared to that provided by the control PPO-encoding nucleic acid.

[1226] In a preferred embodiment, the mutated PPO-encoding nucleic acid selected in step d) provides at least 2-fold as much resistance or tolerance of a cell or plant to a phenyluracil herbicide as compared to that provided by the control PPO-encoding nucleic acid.

[1227] In a further preferred embodiment, the mutated PPO-encoding nucleic acid selected in step d) provides at least 2-fold, at least 5-fold, at least 10-fold, at least 20-fold, at least 50-fold, at least 100-fold, at least 500-fold, as much resistance or tolerance of a cell or plant to a phenyluracil herbicide as compared to that provided by the control PPO-encoding nucleic acid.

[1228] The resistance or tolerance can be determined by generating a transgenic plant or host cell, preferably a plant cell, comprising a nucleic acid sequence of the library of step a) and comparing said transgenic plant with a control plant or host cell, preferably a plant cell.

[1229] Another object refers to a method of identifying a plant or algae containing a nucleic acid comprising a nucleotide sequence encoding a wild-type or mutated PPO which is resistant or tolerant to a phenyluracil herbicide, the method comprising:
[1230] a) identifying an effective amount of a phenyluracil herbicide in a culture of plant cells or green algae that leads to death of said cells.
[1231] b) treating said plant cells or green algae with a mutagenizing agent,
[1232] c) contacting said mutagenized cells population with an effective amount of phenyluracil herbicide, identified in a),
[1233] d) selecting at least one cell surviving these test conditions,
[1234] e) PCR-amplification and sequencing of PPO genes from cells selected in d) and comparing such sequences to wild-type PPO gene sequences, respectively.

[1235] In a preferred embodiment, said mutagenizing agent is ethylmethanesulfonate (EMS). Many methods well known to the skilled artisan are available for obtaining suitable candidate nucleic acids for identifying a nucleotide sequence encoding a mutated PPO from a variety of different potential source organisms including microbes, plants, fungi, algae, mixed cultures etc. as well as environmental sources of DNA such as soil. These methods include inter alia the preparation of cDNA or genomic DNA libraries, the use of suitably degenerate oligonucleotide primers, the use of probes based upon known sequences or complementation assays (for example, for growth upon tyrosine) as well as the use of mutagenesis and shuffling in order to provide recombined or shuffled mutated PPO-encoding sequences.

[1236] Nucleic acids comprising candidate and control PPO encoding sequences can be expressed in yeast, in a bacterial host strain, in an alga or in a higher plant such as tobacco or Arabidopsis and the relative levels of inherent tolerance of the PPO encoding sequences screened according to a visible indicator phenotype of the transformed strain or plant in the presence of different concentrations of the selected phenyluracil herbicide. Dose responses and relative shifts in dose responses associated with these indicator phenotypes (formation of brown color, growth inhibition, herbicidal effect etc) are conveniently expressed in terms, for example, of GR50 (concentration for 50% reduction of growth) or MIC (minimum inhibitory concentration) values where increases in values correspond to increases in inherent tolerance of the expressed PPO. For example, in a relatively rapid assay system based upon transformation of a bacterium such as E. coli, each mutated PPO encoding sequence may be expressed, for example, as a DNA sequence under expression control of a controllable promoter such as the lacZ promoter and taking suitable account, for example by the use of synthetic DNA, of such issues as codon usage in order to obtain as comparable a level of expression as possible of different PPO sequences. Such strains expressing nucleic acids comprising alternative candidate PPO sequences may be plated out on different concentrations of the selected phenyluracil herbicide in, optionally, a tyrosine supplemented medium and the relative levels of inherent tolerance of the expressed PPO enzymes estimated on the basis of the extent and MIC for inhibition of the formation of the brown, ochronotic pigment.

[1237] In another embodiment, candidate nucleic acids are transformed into plant material to generate a transgenic plant, regenerated into morphologically normal fertile plants which are then measured for differential tolerance to selected phenyluracil herbicides as described in the Example section hereinafter. Many suitable methods for transformation using suitable selection markers such as kanamycin, binary vectors such as from Agrobacterium and plant regeneration as, for example, from tobacco leaf discs are well known in the art. Optionally, a control population of plants is likewise transformed with a nucleic acid expressing the control PPO. Alternatively, an untransformed dicot plant such as Arabidopsis or Tobacco can be used as a control since this, in any case, expresses its own endogenous PPO. The average, and distribution, of herbicide tolerance levels of a range of primary plant transformation events or their progeny to phenyluracil herbicides described supra are evaluated in the normal manner based upon plant damage, meristematic bleaching symptoms etc. at a range of different concentrations of herbicides. These data can be expressed in terms of, for example, GR50 values derived from dose/response curves having “dose” plotted on the x-axis and “percentage kill”, “herbicidal effect”, “numbers of emerging green plants” etc. plotted on the y-axis where increased GR50 values correspond to increased levels of inherent tolerance of the expressed PPO. Herbicides can suitably be applied pre-emergence or post-emergence.

[1238] In another embodiment, the invention refers to a plant cell transformed by a nucleic acid encoding a herbicide tolerant PPO polypeptide disclosed herein or to a plant cell which has been mutated to obtain a plant expressing a nucleic acid encoding a mutated PPO polypeptide according to the present invention, wherein expression of the nucleic acid in the plant cell results in increased resistance or tolerance to a phenyluracil herbicide as compared to a wild type variety of the plant cell.

[1239] The term “expression/expressing” or “gene expression” means the transcription of a specific gene or specific genes or specific genetic construct. The term “expression” or “gene expression” in particular means the transcription of a gene or genes or genetic construct into structural RNA (rRNA, tRNA) or mRNA with or without subsequent translation of the latter into a protein. The process includes transcription of DNA and processing of the resulting mRNA product.

[1240] To obtain the desired effect, i.e. plants that are tolerant or resistant to the phenyluracil herbicide derivative herbicide of the present invention, it will be understood that the at least one nucleic acid is “over-expressed” by methods and means known to the person skilled in the art.

[1241] The term “increased expression” or “overexpression” as used herein means any form of expression that is additional to the original wild-type expression level. Methods for increasing expression of genes or gene products are well documented in the art and include, for example, overexpression driven by appropriate promoters, the use of transcription enhancers or translation enhancers. Isolated nucleic acids which serve as promoter or enhancer elements may be introduced in an appropriate position (typically upstream) of a non-heterologous form of a polynucleotide so as to upregulate expression of a nucleic acid encoding the polypeptide of interest. For example, endogenous promoters may be altered in vivo by mutation, deletion, and/or substitution (see, Kmiec, U.S. Pat. No. 5,565,350; Zarling et al., WO9322443), or isolated promoters may be introduced into a plant cell in the proper orientation and distance from a gene of the present invention so as to control the expression of the gene.

[1242] If polypeptide expression is desired, it is generally desirable to include a polyadenylation region at the 3′-end of a polynucleotide coding region. The polyadenylation region can be derived from the natural gene, from a variety of other plant genes, or from T-DNA. The 3′ end sequence to be added may be derived from, for example, the nopaline synthase or octopine synthase genes, or alternatively from another plant gene, or less preferably from any other eukaryotic gene.

[1243] An intron sequence may also be added to the 5′ untranslated region (UTR) or the coding sequence of the partial coding sequence to increase the amount of the mature message that accumulates in the cytosol. Inclusion of a spliceable intron in the transcription unit in both plant and animal expression constructs has been shown to increase gene expression at both the mRNA and protein levels up to 1000-fold (Buchman and Berg (1988) Mol. Cell biol. 8: 4395-4405; Callis et al. (1987) Genes Dev 1:1183-1200). Such intron enhancement of gene expression is typically greatest when placed near the 5′ end of the transcription unit. Use of the maize introns Adh1-S intron 1, 2, and 6, the Bronze-1 intron are known in the art. For general information see: The Maize Handbook, Chapter 116, Freeling and Walbot, Eds., Springer, N.Y. (1994)

[1244] The term “introduction” or “transformation” as referred to herein encompasses the transfer of an exogenous polynucleotide into a host cell, irrespective of the method used for transfer. Plant tissue capable of subsequent clonal propagation, whether by organogenesis or embryogenesis, may be transformed with a genetic construct of the present invention and a whole plant regenerated there from. The particular tissue chosen will vary depending on the clonal propagation systems available for, and best suited to, the particular species being transformed. Exemplary tissue targets include leaf disks, pollen, embryos, cotyledons, hypocotyls, megagametophytes, callus tissue, existing meristematic tissue (e.g., apical meristem, axillary buds, and root meristems), and induced meristem tissue (e.g., cotyledon meristem and hypocotyl meristem). The polynucleotide may be transiently or stably introduced into a host cell and may be maintained non-integrated, for example, as a plasmid. Alternatively, it may be integrated into the host genome. The resulting transformed plant cell may then be used to regenerate a transformed plant in a manner known to persons skilled in the art.

[1245] The transfer of foreign genes into the genome of a plant is called transformation. Transformation of plant species is now a fairly routine technique. Advantageously, any of several transformation methods may be used to introduce the gene of interest into a suitable ancestor cell. The methods described for the transformation and regeneration of plants from plant tissues or plant cells may be utilized for transient or for stable transformation. Transformation methods include the use of liposomes, electroporation, chemicals that increase free DNA uptake, injection of the DNA directly into the plant, particle gun bombardment, transformation using viruses or pollen and microprojection. Methods may be selected from the calcium/polyethylene glycol method for protoplasts (Krens, F. A. et al., (1982) Nature 296, 72-74; Negrutiu I et al. (1987) Plant Mol Biol 8: 363-373); electroporation of protoplasts (Shillito R. D. et al. (1985) Bio/Technol 3, 1099-1102); microinjection into plant material (Crossway A et al., (1986) Mol. Gen Genet 202: 179-185); DNA or RNA-coated particle bombardment (Klein™ et al., (1987) Nature 327: 70) infection with (non-integrative) viruses and the like. Transgenic plants, including transgenic crop plants, are preferably produced via Agrobacterium-mediated transformation. An advantageous transformation method is the transformation in planta. To this end, it is possible, for example, to allow the agrobacteria to act on plant seeds or to inoculate the plant meristem with agrobacteria. It has proved particularly expedient in accordance with the invention to allow a suspension of transformed agrobacteria to act on the intact plant or at least on the flower primordia. The plant is subsequently grown on until the seeds of the treated plant are obtained (Clough and Bent, Plant J. (1998) 16, 735-743). Methods for Agrobacterium-mediated transformation of rice include well known methods for rice transformation, such as those described in any of the following: European patent application EP 1198985 A1, Aldemita and Hodges (Planta 199: 612-617, 1996); Chan et al. (Plant Mol Biol 22 (3): 491-506, 1993), Hiei et al. (Plant J 6 (2): 271-282, 1994), which disclosures are incorporated by reference herein as if fully set forth. In the case of corn transformation, the preferred method is as described in either Ishida et al. (Nat. Biotechnol 14(6): 745-50, 1996) or Frame et al. (Plant Physiol 129(1): 13-22, 2002), which disclosures are incorporated by reference herein as if fully set forth. Said methods are further described by way of example in B. Jenes et al., Techniques for Gene Transfer, in: Transgenic Plants, Vol. 1, Engineering and Utilization, eds. S. D. Kung and R. Wu, Academic Press (1993) 128-143 and in Potrykus Annu. Rev. Plant Physiol. Plant Molec. Biol. 42 (1991) 205-225). The nucleic acids or the construct to be expressed is preferably cloned into a vector, which is suitable for transforming Agrobacterium tumefaciens, for example pBin19 (Bevan et al., Nucl. Acids Res. 12 (1984) 8711). Agrobacteria transformed by such a vector can then be used in known manner for the transformation of plants, such as plants used as a model, like Arabidopsis (Arabidopsis thaliana is within the scope of the present invention not considered as a crop plant), or crop plants such as, by way of example, tobacco plants, for example by immersing bruised leaves or chopped leaves in an agrobacterial solution and then culturing them in suitable media. The transformation of plants by means of Agrobacterium tumefaciens is described, for example, by Hofgen and Willmitzer in Nucl. Acid Res. (1988) 16, 9877 or is known inter alia from F. F. White, Vectors for Gene Transfer in Higher Plants; in Transgenic Plants, Vol. 1, Engineering and Utilization, eds. S. D. Kung and R. Wu, Academic Press, 1993, pp. 15-38.

[1246] In addition to the transformation of somatic cells, which then have to be regenerated into intact plants, it is also possible to transform the cells of plant meristems and in particular those cells which develop into gametes. In this case, the transformed gametes follow the natural plant development, giving rise to transgenic plants. Thus, for example, seeds of Arabidopsis are treated with agrobacteria and seeds are obtained from the developing plants of which a certain proportion is transformed and thus transgenic [Feldman, K A and Marks M D (1987). Mol Gen Genet 208:274-289; Feldmann K (1992). In: C Koncz, N-H Chua and J Shell, eds, Methods in Arabidopsis Research. Word Scientific, Singapore, pp. 274-289]. Alternative methods are based on the repeated removal of the inflorescences and incubation of the excision site in the center of the rosette with transformed agrobacteria, whereby transformed seeds can likewise be obtained at a later point in time (Chang (1994). Plant J. 5: 551-558; Katavic (1994). Mol Gen Genet, 245: 363-370). However, an especially effective method is the vacuum infiltration method with its modifications such as the “floral dip” method. In the case of vacuum infiltration of Arabidopsis, intact plants under reduced pressure are treated with an agrobacterial suspension [Bechthold, N (1993). C R Acad Sci Paris Life Sci, 316: 1194-1199], while in the case of the “floral dip” method the developing floral tissue is incubated briefly with a surfactant-treated agrobacterial suspension [Clough, S J and Bent A F (1998) The Plant J. 16, 735-743]. A certain proportion of transgenic seeds are harvested in both cases, and these seeds can be distinguished from non-transgenic seeds by growing under the above-described selective conditions. In addition the stable transformation of plastids is of advantages because plastids are inherited maternally is most crops reducing or eliminating the risk of transgene flow through pollen. The transformation of the chloroplast genome is generally achieved by a process which has been schematically displayed in Klaus et al., 2004 [Nature Biotechnology 22 (2), 225-229]. Briefly the sequences to be transformed are cloned together with a selectable marker gene between flanking sequences homologous to the chloroplast genome. These homologous flanking sequences direct site specific integration into the plastome. Plastidal transformation has been described for many different plant species and an overview is given in Bock (2001) Transgenic plastids in basic research and plant biotechnology. J Mol Biol. 2001 Sep. 21; 312 (3):425-38 or Maliga, P (2003) Progress towards commercialization of plastid transformation technology. Trends Biotechnol. 21, 20-28. Further biotechnological progress has recently been reported in form of marker free plastid transformants, which can be produced by a transient co-integrated maker gene (Klaus et al., 2004, Nature Biotechnology 22(2), 225-229). The genetically modified plant cells can be regenerated via all methods with which the skilled worker is familiar. Suitable methods can be found in the abovementioned publications by S. D. Kung and R. Wu, Potrykus or Hofgen and Willmitzer.

[1247] Generally after transformation, plant cells or cell groupings are selected for the presence of one or more markers which are encoded by plant-expressible genes co-transferred with the gene of interest, following which the transformed material is regenerated into a whole plant. To select transformed plants, the plant material obtained in the transformation is, as a rule, subjected to selective conditions so that transformed plants can be distinguished from untransformed plants. For example, the seeds obtained in the above-described manner can be planted and, after an initial growing period, subjected to a suitable selection by spraying. A further possibility consists in growing the seeds, if appropriate after sterilization, on agar plates using a suitable selection agent so that only the transformed seeds can grow into plants. Alternatively, the transformed plants are screened for the presence of a selectable marker such as the ones described above.

[1248] Following DNA transfer and regeneration, putatively transformed plants may also be evaluated, for instance using Southern analysis, for the presence of the gene of interest, copy number and/or genomic organisation. Alternatively or additionally, expression levels of the newly introduced DNA may be monitored using Northern and/or Western analysis, both techniques being well known to persons having ordinary skill in the art.

[1249] The generated transformed plants may be propagated by a variety of means, such as by clonal propagation or classical breeding techniques. For example, a first generation (or T1) transformed plant may be selfed and homozygous second-generation (or T2) transformants selected, and the T2 plants may then further be propagated through classical breeding techniques. The generated transformed organisms may take a variety of forms. For example, they may be chimeras of transformed cells and non-transformed cells; clonal transformants (e.g., all cells transformed to contain the expression cassette); grafts of transformed and untransformed tissues (e.g., in plants, a transformed rootstock grafted to an untransformed scion).

[1250] Preferably, the wild-type or mutated PPO nucleic acid comprises a polynucleotide sequence selected from the group consisting of: a) a polynucleotide encoding a polypeptide as shown in SEQ ID NO: 1, 2, 3, 4, 5, 6, 7, 8, 9, 10, 11, 12, 13, 14, 15, 16, 17, 18, 19, 20, 21, 22, 23, 24, 25, 26, 27, 28, 29, 30, 31, 32, 33, 34, 35, 36, 37, 38, 39, 40, 41, 42, 43, 44, 45, 46, 47, 48, 49, 50, 51, 52, 53, 54, 55, 56, 57, 58, 59, 60, 61, 62, 63, 64, 65, 66, 67, 68, 69, 70, 71, 72, 73, 74, 75, 76, 77, 78, 79, 80, 81, 82, 83, 84, 85, 86, 87, 88, 89, 90, 91, 92, 93, 94, 95, 96, 97, 98, 99, 100, 101, 102, 103, 104, 105, 106, 107, 108, 109, 110, 111, 112, 113, 114, 115, 116, 117, 577, 579, 581, 583, 585, 587, 589, 591, 593, 595, 597, 599, 601, 603, 605, 607, 609, 611, 613, 615, 617, 619, 621, 623, 625, 627, or 637, or a variant or derivative thereof; b) a polynucleotide comprising at least 60 consecutive nucleotides of any of a); and c) a polynucleotide complementary to the polynucleotide of any of a) through b).

[1251] Preferably, the expression of the nucleic acid in the plant results in the plant's increased resistance to phenyluracil herbicide as compared to a wild type variety of the plant.

[1252] In another embodiment, the invention refers to a plant, preferably a transgenic plant, comprising a plant cell according to the present invention, wherein expression of the nucleic acid in the plant results in the plant's increased resistance to phenyluracil herbicide as compared to a wild type variety of the plant.

[1253] The plants described herein can be either transgenic crop plants or non-transgenic plants.

[1254] For the purposes of the invention, “transgenic”, “transgene” or “recombinant” means with regard to, for example, a nucleic acid sequence, an expression cassette, gene construct or a vector comprising the nucleic acid sequence or an organism transformed with the nucleic acid sequences, expression cassettes or vectors according to the invention, all those constructions brought about by recombinant methods in which either
[1255] (a) the nucleic acid sequences encoding proteins useful in the methods of the invention, or
[1256] (b) genetic control sequence(s) which is operably linked with the nucleic acid sequence according to the invention, for example a promoter, or
[1257] (c) a) and b)
[1258] are not located in their natural genetic environment or have been modified by recombinant methods, it being possible for the modification to take the form of, for example, a substitution, addition, deletion, inversion or insertion of one or more nucleotide residues in order to allow for the expression of the mutated PPO of the present invention. The natural genetic environment is understood as meaning the natural genomic or chromosomal locus in the original plant or the presence in a genomic library. In the case of a genomic library, the natural genetic environment of the nucleic acid sequence is preferably retained, at least in part. The environment flanks the nucleic acid sequence at least on one side and has a sequence length of at least 50 bp, preferably at least 500 bp, especially preferably at least 1000 bp, most preferably at least 5000 bp. A naturally occurring expression cassette—for example the naturally occurring combination of the natural promoter of the nucleic acid sequences with the corresponding nucleic acid sequence encoding a polypeptide useful in the methods of the present invention, as defined above—becomes a transgenic expression cassette when this expression cassette is modified by non-natural, synthetic (“artificial”) methods such as, for example, mutagenic treatment. Suitable methods are described, for example, in U.S. Pat. No. 5,565,350 or WO 00/15815.

[1259] A transgenic plant for the purposes of the invention is thus understood as meaning, as above, that the nucleic acids of the invention are not at their natural locus in the genome of said plant, it being possible for the nucleic acids to be expressed homologously or heterologously. However, as mentioned, transgenic also means that, while the nucleic acids according to the invention or used in the inventive method are at their natural position in the genome of a plant, the sequence has been modified with regard to the natural sequence, and/or that the regulatory sequences of the natural sequences have been modified. Transgenic is preferably understood as meaning the expression of the nucleic acids according to the invention at an unnatural locus in the genome, i.e. homologous or, preferably, heterologous expression of the nucleic acids takes place. Preferred transgenic plants are mentioned herein. Furthermore, the term “transgenic” refers to any plant, plant cell, callus, plant tissue, or plant part, that contains all or part of at least one recombinant polynucleotide. In many cases, all or part of the recombinant polynucleotide is stably integrated into a chromosome or stable extra-chromosomal element, so that it is passed on to successive generations. For the purposes of the invention, the term “recombinant polynucleotide” refers to a polynucleotide that has been altered, rearranged, or modified by genetic engineering. Examples include any cloned polynucleotide, or polynucleotides, that are linked or joined to heterologous sequences. The term “recombinant” does not refer to alterations of polynucleotides that result from naturally occurring events, such as spontaneous mutations, or from non-spontaneous mutagenesis followed by selective breeding.

[1260] Plants containing mutations arising due to non-spontaneous mutagenesis and selective breeding are referred to herein as non-transgenic plants and are included in the present invention. In embodiments wherein the plant is transgenic and comprises multiple mutated PPO nucleic acids, the nucleic acids can be derived from different genomes or from the same genome. Alternatively, in embodiments wherein the plant is non-transgenic and comprises multiple mutated PPO nucleic acids, the nucleic acids are located on different genomes or on the same genome.

[1261] As used herein, “mutagenized” refers to an organism or DNA thereof having alteration(s) in the biomolecular sequence of its native genetic material as compared to the sequence of the genetic material of a corresponding wild-type organism or DNA, wherein the alteration(s) in genetic material were induced and/or selected by human action. Methods of inducing mutations can induce mutations in random positions in the genetic material or can induce mutations in specific locations in the genetic material (i.e., can be directed mutagenesis techniques), such as by use of a genoplasty technique.

[1262] In certain embodiments, the present invention involves herbidicide-resistant plants that are produced by mutation breeding. Such plants comprise a polynucleotide encoding a mutated PPO and are tolerant to one or more phenyluracil herbicides. Such methods can involve, for example, exposing the plants or seeds to a mutagen, particularly a chemical mutagen such as, for example, ethyl methanesulfonate (EMS) and selecting for plants that have enhanced tolerance to at least one or more phenyluracil herbicide.

[1263] However, the present invention is not limited to herbicide-tolerant plants that are produced by a mutagenesis method involving the chemical mutagen EMS. Any mutagenesis method known in the art may be used to produce the herbicide-resistant plants of the present invention. Such mutagenesis methods can involve, for example, the use of any one or more of the following mutagens: radiation, such as X-rays, Gamma rays (e.g., cobalt 60 or cesium 137), neutrons, (e.g., product of nuclear fission by uranium 235 in an atomic reactor), Beta radiation (e.g., emitted from radioisotopes such as phosphorus 32 or carbon 14), and ultraviolet radiation (preferably from 2500 to 2900 nm), and chemical mutagens such as base analogues (e.g., 5-bromo-uracil), related compounds (e.g., 8-ethoxy caffeine), antibiotics (e.g., streptonigrin), alkylating agents (e.g., sulfur mustards, nitrogen mustards, epoxides, ethylenamines, sulfates, sulfonates, sulfones, lactones), azide, hydroxylamine, nitrous acid, or acridines. Herbicide-resistant plants can also be produced by using tissue culture methods to select for plant cells comprising herbicide-resistance mutations and then regenerating herbicide-resistant plants therefrom. See, for example, U.S. Pat. Nos. 5,773,702 and 5,859,348, both of which are herein incorporated in their entirety by reference. Further details of mutation breeding can be found in “Principals of Cultivar Development” Fehr, 1993 Macmillan Publishing Company the disclosure of which is incorporated herein by reference

[1264] Alternatively, herbicide-resistant plants according to the present invention can also be produced by using genome editing methods to select for plant cells comprising herbicide-resistance mutations and then regenerating herbicide-resistant plants therefrom. “Genome Editing” refers to a type of genetic engineering in which DNA is inserted, deleted or replaced in the genome of an organism using engineered nucleases. These nucleases are known to the skilled artisan to create site-specific double-strand breaks at desired locations in the genome. The induced double-strand breaks are repaired through nonhomologous end-joining or homologous recombination, resulting in targeted mutations. Known in the art are currently four families of engineered nucleases which can be used for the purposes of the present invention: meganucleases, zinc finger nucleases (ZFNs), transcription activator-like effector-based nucleases (TALEN), and the CRISPR-Cas system. For references, see, for example, Esvelt, K M. and Wang, H H. (2013) “Genome-scale engineering for systems and synthetic biology”, Mol Syst Biol. 9 (1): 641; Tan, W S. et al., (2012) “Precision editing of large animal genomes”, Adv Genet. 80: 37-97; Puchta, H. and Fauser, F. (2013) “Gene targeting in plants: 25 years later”, Int. J. Dev. Biol. 57: 629-637; Boglioli, Elsy and Richard, Magali “Rewriting the book of life: a new era in precision genome editing”, Boston Consulting Group, Retrieved Nov. 30, 2015; Method of the Year 2011. Nat Meth 9 (1), 1-1.

[1265] Consequently, in another embodiment, the invention refers to a non-transgenic plant, comprising a plant cell according to the present invention, wherein expression of the nucleic acid encoding a mutated PPO in the plant results in the plant's increased resistance to phenyluracil herbicide as compared to a wild type variety of the plant.

[1266] In addition to the definition above, the term “plant” is intended to encompass crop plants at any stage of maturity or development, as well as any tissues or organs (plant parts) taken or derived from any such plant unless otherwise clearly indicated by context. Plant parts include, but are not limited to, stems, roots, flowers, ovules, stamens, leaves, embryos, meristematic regions, callus tissue, anther cultures, gametophytes, sporophytes, pollen, microspores, protoplasts, and the like.

[1267] The plant of the present invention comprises at least one mutated PPO nucleic acid or over-expressed wild-type PPO nucleic acid, and has increased tolerance to a phenyluracil herbicide as compared to a wild-type variety of the plant. It is possible for the plants of the present invention to have multiple wild-type or mutated PPO nucleic acids from different genomes since these plants can contain more than one genome. For example, a plant contains two genomes, usually referred to as the A and B genomes. Because PPO is a required metabolic enzyme, it is assumed that each genome has at least one gene coding for the PPO enzyme (i.e. at least one PPO gene). As used herein, the term “PPO gene locus” refers to the position of an PPO gene on a genome, and the terms “PPO gene” and “PPO nucleic acid” refer to a nucleic acid encoding the PPO enzyme. The PPO nucleic acid on each genome differs in its nucleotide sequence from an PPO nucleic acid on another genome. One of skill in the art can determine the genome of origin of each PPO nucleic acid through genetic crossing and/or either sequencing methods or exonuclease digestion methods known to those of skill in the art.

[1268] The present invention includes plants comprising one, two, three, or more mutated PPO alleles, wherein the plant has increased tolerance to a phenyluracil herbicide as compared to a wild-type variety of the plant. The mutated PPO alleles can comprise a nucleotide sequence selected from the group consisting of a polynucleotide encoding a polypeptide as defined in SEQ ID NO: 1, 2, 3, 4, 5, 6, 7, 8, 9, 10, 11, 12, 13, 14, 15, 16, 17, 18, 19, 20, 21, 22, 23, 24, 25, 26, 27, 28, 29, 30, 31, 32, 33, 34, 35, 36, 37, 38, 39, 40, 41, 42, 43, 44, 45, 46, 47, 48, 49, 50, 51, 52, 53, 54, 55, 56, 57, 58, 59, 60, 61, 62, 63, 64, 65, 66, 67, 68, 69, 70, 71, 72, 73, 74, 75, 76, 77, 78, 79, 80, 81, 82, 83, 84, 85, 86, 87, 88, 89, 90, 91, 92, 93, 94, 95, 96, 97, 98, 99, 100, 101, 102, 103, 104, 105, 106, 107, 108, 109, 110, 111, 112, 113, 114, 115, 116, 117, 577, 579, 581, 583, 585, 587, 589, 591, 593, 595, 597, 599, 601,603, 605, 607, 609, 611,613, 615, 617, 619, 621, 623, 625, 627, or 637, 265, 266, 267, 268, 269, 270, 271, 272, 273, 274, 275, 276, 277, 278, 279, 280, 281, 282, 283, 284, 285, 286, 287, 288, 289, 290, 291, 292, 293, 294, 295, 296, 297, 298, 299, 300, 301, 302, 303, 304, 305, 306, 307, 308, 309, 310, 311, 312, 313, 314, 315, 316, 317, 318, 319, 320, 321, 322, 323, 324, 325, 326, 327328, 329, 330, 331, 332, 333, 334, 335, 336, 337, 338, 339, 340, 341, 342, 343, 344, 345, 346, 347, 348, 349, 350, 351, 352, 353, 354, 355, 356, 357, 358, 359, 360, 361, 362, 363, 364, 365, 366, 367, 368, 369, 370, 371, 372, 373, 374, 375, 376, 377, 378, 379, 380, 381, 382, 383, 384, 385, 386, 387, 388, 389, 390, 391, 392, 393, 394, 395, 396, 397, 398, 399, 400, 401, 402, 403, 404, 405, 406, 407, 408, 409, 410, 411, 412, 413, 414, 415, 416, 417, 418, 419, 420, 421, 422, 423, 424, 425, 426, 427, 428, 429, 430, 431, 432, 433, 434, 435, 436, 437, 438, 439, 440, 441, 442, 443, 444, 445, 446, 447, 448, 449, 450, 451, 452, 453, 454, 455, 456, 457, 458, 459, 460, 461, 462, 463, 464, 465, 466, 467, 468, 469, 470, 471, 472, 473, 474, 475, 476, 477, 478, 479, 480, 481, 482, 483, 484, 485, 486, 487, 488, 489, 490, 491, 492, 493, 494, 495, 496, 497, 498, 499, 500, 501, 502, 503, 504, 505, 506, 507, 508, 509, 510, 511, 512, 513, 514, 515, 516, 517, 518, 519, 520, 521, 522, 523, 524, 525, 526, 527, 528, 529, 530, 531, 532, 533, 534, 535, 536, 537, 538, 539, 540, 541, 542, 543, 544, 545, 546, 547, 548, 549, 550, 551, 552, 553, 554, 555, 556, 557, 558, 559, 560, 561, 562, 563, 564, 565, 651; 652; 653; 654; 655; 656; 657; 658; 659; 660; 661; 662; 663; 664; 665; 666; 667; 668; 669; 670; 671, 714; 715; 716; 717; 718; 719; 720; 721; 722; 723; 724; 725; 726; 727; 728; 729; 730; 731; 732; 733; 734; 735; 736; 737; 738, 795, 882, 883, 884, 885, 886, 887, 888, 889, 890, 891, 892, 893, 894, 895, 896, 897, 898, 899, 900, 901, 902, 903, 904, 905, 906, 907, 908, 909, 910, 911, 912, 913, 914, 915, 916, 917, 918, 919, 920, 921, 922, 923, 924, 925, 926, 927, 928, 929, 930, 931, 932, 933, 934, 935, 936, 937, 938, 939, 940, 941, 942, 943, 944, 945, 946, 947, 948, 949, 950, 951, 952, 953, 954, 955, 956, 957, 958, 959, 960, or a variant or derivative, homologue, orthologue, paralogue thereof, a polynucleotide comprising at least 60 consecutive nucleotides of any of the aforementioned polynucleotides; and a polynucleotide complementary to any of the aforementioned polynucleotides.

[1269] “Alleles” or “allelic variants” are alternative forms of a given gene, located at the same chromosomal position. Allelic variants encompass Single Nucleotide Polymorphisms (SNPs), as well as Small Insertion/Deletion Polymorphisms (INDELs). The size of INDELs is usually less than 100 bp. SNPs and INDELs form the largest set of sequence variants in naturally occurring polymorphic strains of most organisms

[1270] The term “variety” refers to a group of plants within a species defined by the sharing of a common set of characteristics or traits accepted by those skilled in the art as sufficient to distinguish one cultivar or variety from another cultivar or variety. There is no implication in either term that all plants of any given cultivar or variety will be genetically identical at either the whole gene or molecular level or that any given plant will be homozygous at all loci. A cultivar or variety is considered “true breeding” for a particular trait if, when the true-breeding cultivar or variety is self-pollinated, all of the progeny contain the trait. The terms “breeding line” or “line” refer to a group of plants within a cultivar defined by the sharing of a common set of characteristics or traits accepted by those skilled in the art as sufficient to distinguish one breeding line or line from another breeding line or line. There is no implication in either term that all plants of any given breeding line or line will be genetically identical at either the whole gene or molecular level or that any given plant will be homozygous at all loci. A breeding line or line is considered “true breeding” for a particular trait if, when the true-breeding line or breeding line is self-pollinated, all of the progeny contain the trait. In the present invention, the trait arises from a mutation in a PPO gene of the plant or seed.

[1271] In some embodiments, traditional plant breeding is employed whereby the phenyluracil herbicides-tolerant trait is introduced in the progeny plant resulting therefrom. In one embodiment, the present invention provides a method for producing a phenyluracil herbicides-tolerant progeny plant, the method comprising: crossing a parent plant with a phenyluracil herbicides-tolerant plant to introduce the phenyluracil herbicides-tolerance characteristics of the phenyluracil herbicides-tolerant plant into the germplasm of the progeny plant, wherein the progeny plant has increased tolerance to the phenyluracil herbicides relative to the parent plant. In other embodiments, the method further comprises the step of introgressing the phenyluracil herbicides-tolerance characteristics through traditional plant breeding techniques to obtain a descendent plant having the phenyluracil herbicides-tolerance characteristics.

[1272] The herbicide-resistant plants of the invention that comprise polynucleotides encoding mutated PPO polypeptides also find use in methods for increasing the herbicide-resistance of a plant through conventional plant breeding involving sexual reproduction. The methods comprise crossing a first plant that is a herbicide-resistant plant of the invention to a second plant that may or may not be resistant to the same herbicide or herbicides as the first plant or may be resistant to different herbicide or herbicides than the first plant. The second plant can be any plant that is capable of producing viable progeny plants (i.e., seeds) when crossed with the first plant. Typically, but not necessarily, the first and second plants are of the same species. The methods can optionally involve selecting for progeny plants that comprise the mutated PPO polypeptides of the first plant and the herbicide resistance characteristics of the second plant. The progeny plants produced by this method of the present invention have increased resistance to a herbicide when compared to either the first or second plant or both. When the first and second plants are resistant to different herbicides, the progeny plants will have the combined herbicide tolerance characteristics of the first and second plants. The methods of the invention can further involve one or more generations of backcrossing the progeny plants of the first cross to a plant of the same line or genotype as either the first or second plant. Alternatively, the progeny of the first cross or any subsequent cross can be crossed to a third plant that is of a different line or genotype than either the first or second plant. The present invention also provides plants, plant organs, plant tissues, plant cells, seeds, and non-human host cells that are transformed with the at least one polynucleotide molecule, expression cassette, or transformation vector of the invention. Such transformed plants, plant organs, plant tissues, plant cells, seeds, and non-human host cells have enhanced tolerance or resistance to at least one herbicide, at levels of the herbicide that kill or inhibit the growth of an untransformed plant, plant tissue, plant cell, or non-human host cell, respectively. Preferably, the transformed plants, plant tissues, plant cells, and seeds of the invention are Arabidopsis thaliana and crop plants.

[1273] In other aspects, plants of the invention include those plants which, in addition to being tolerant to phenyluracil herbicides, have been subjected to further genetic modifications by breeding, mutagenesis or genetic engineering, e.g. have been rendered tolerant to applications of specific other classes of herbicides, such as AHAS inhibitors; auxinic herbicides; bleaching herbicides such as hydroxyphenylpyruvate dioxygenase (HPPD) inhibitors or phytoene desaturase (PDS) inhibitors; EPSPS inhibitors such as glyphosate; glutamine synthetase (GS) inhibitors such as glufosinate; lipid biosynthesis inhibitors such as acetyl CoA carboxylase (ACCase) inhibitors; or oxynil {i.e. bromoxynil or ioxynil) herbicides as a result of conventional methods of breeding or genetic engineering, Thus, phenyluracil herbicides-tolerant plants of the invention can be made resistant to multiple classes of herbicides through multiple genetic modifications, such as resistance to both glyphosate and glufosinate or to both glyphosate and a herbicide from another class such as HPPD inhibitors, AHAS inhibitors, or ACCase inhibitors. These herbicide resistance technologies are, for example, described in Pest Management Science (at volume, year, page): 61, 2005, 246; 61, 2005, 258; 61, 2005, 277; 61, 2005, 269; 61, 2005, 286; 64, 2008, 326; 64, 2008, 332; Weed Science 57, 2009, 108; Australian Journal of Agricultural Research 58, 2007, 708; Science 316, 2007, 1185; and references quoted therein. For example, phenyluracil herbicides-tolerant plants of the invention, in some embodiments, may be tolerant to ACCase inhibitors, such as “dims” {e.g., cycloxydim, sethoxydim, clethodim, or tepraloxydim), “fops” {e.g., clodinafop, diclofop, fluazifop, haloxyfop, or quizalofop), and “dens” (such as pinoxaden); to auxinic herbicides, such as dicamba; to EPSPS inhibitors, such as glyphosate; to other PPO inhibitors; and to GS inhibitors, such as glufosinate.

[1274] In addition to these classes of inhibitors, phenyluracil herbicides-tolerant plants of the invention may also be tolerant to herbicides having other modes of action, for example, chlorophyll/carotenoid pigment inhibitors, cell membrane disrupters, photosynthesis inhibitors, cell division inhibitors, root inhibitors, shoot inhibitors, and combinations thereof.

[1275] Such tolerance traits may be expressed, e.g.: as mutant or wildtype PPO proteins, as mutant AHASL proteins, mutant ACCase proteins, mutant EPSPS proteins, or mutant glutamine synthetase proteins; or as mutant native, inbred, or transgenic aryloxyalkanoate dioxygenase (AAD or DHT), haloarylnitrilase (BXN), 2,2-dichloropropionic acid dehalogenase (DEH), glyphosate-N-acetyltransferase (GAT), glyphosate decarboxylase (GDC), glyphosate oxidoreductase (GOX), glutathione-S-transferase (GST), phosphinothricin acetyltransferase (PAT or bar), or CYP450s proteins having an herbicide-degrading activity.

[1276] phenyluracil herbicides-tolerant plants hereof can also be stacked with other traits including, but not limited to, pesticidal traits such as Bt Cry and other proteins having pesticidal activity toward coleopteran, lepidopteran, nematode, or other pests; nutrition or nutraceutical traits such as modified oil content or oil profile traits, high protein or high amino acid concentration traits, and other trait types known in the art.

[1277] Furthermore, in other embodiments, phenyluracil herbicides-tolerant plants are also covered which are, by the use of recombinant DNA techniques and/or by breeding and/or otherwise selected for such characteristics, rendered able to synthesize one or more insecticidal proteins, especially those known from the bacterial genus Bacillus, particularly from Bacillus thuringiensis, such as [delta]-endotoxins, e.g. CryIA(b), CryIA(c), CryIF, CryIF(a2), CryIIA(b), CryIIIA, CryIIIB(b1) or Cry9c; vegetative insecticidal proteins (VIP), e.g. VIP1, VIP2, VIP3 or VIP3A; insecticidal proteins of bacteria colonizing nematodes, e.g. Photorhabdus spp. or Xenorhabdus spp.; toxins produced by animals, such as scorpion toxins, arachnid toxins, wasp toxins, or other insect-specific neurotoxins; toxins produced by fungi, such streptomycete toxins; plant lectins, such as pea or barley lectins; agglutinins; proteinase inhibitors, such as trypsin inhibitors, serine protease inhibitors, patatin, cystatin or papain inhibitors; ribosome-inactivating proteins (RIP), such as ricin, maize-RIP, abrin, luffin, saporin or bryodin; steroid metabolism enzymes, such as 3-hydroxy-steroid oxidase, ecdysteroid-IDP-glycosyl-transferase, cholesterol oxidases, ecdysone inhibitors or HMG-CoA-reductase; ion channel blockers, such as blockers of sodium or calcium channels; juvenile hormone esterase; diuretic hormone receptors (helicokinin receptors); stilben synthase, bibenzyl synthase, chitinases or glucanases. In the context of the present invention these insecticidal proteins or toxins are to be understood expressly also as pre-toxins, hybrid proteins, truncated or otherwise modified proteins. Hybrid proteins are characterized by a new combination of protein domains, (see, e.g. WO 02/015701). Further examples of such toxins or genetically modified plants capable of synthesizing such toxins are disclosed, e.g., in EP-A 374 753, WO 93/007278, WO 95/34656, EP-A 427 529, EP-A 451 878, WO 03/18810 und WO 03/52073. The methods for producing such genetically modified plants are generally known to the person skilled in the art and are described, e.g. in the publications mentioned above. These insecticidal proteins contained in the genetically modified plants impart to the plants producing these proteins tolerance to harmful pests from all taxonomic groups of arthropods, especially to beetles (Coeloptera), two-winged insects (Diptera), and moths (Lepidoptera) and to nematodes (Nematoda).

[1278] In some embodiments, expression of one or more protein toxins (e.g., insecticidal proteins) in the phenyluracil herbicides-tolerant plants is effective for controlling organisms that include, for example, members of the classes and orders: Coleoptera such as the American bean weevil Acanthoscelides obtectus; the leaf beetle Agelastica alni; click beetles (Agriotes lineatus, Agriotes obscurus, Agriotes bicolor); the grain beetle Ahasverus advena; the summer schafer Amphimallon solstitialis; the furniture beetle Anobium punctatum; Anthonomus spp. (weevils); the Pygmy mangold beetle Atomaria linearis; carpet beetles (Anthrenus spp., Attagenus spp.); the cowpea weevil Callosobruchus maculates; the fried fruit beetle Carpophilus hemipterus; the cabbage seedpod weevil Ceutorhynchus assimilis; the rape winter stem weevil Ceutorhynchus picitarsis; the wireworms Conoderus vespertinus and Conoderus falli; the banana weevil Cosmopolites sordidus; the New Zealand grass grub Costelytra zealandica; the June beetle Cotinis nitida; the sunflower stem weevil Cylindrocopturus adspersus; the larder beetle Dermestes lardarius; the corn rootworms Diabrotica virgifera, Diabrotica virgifera virgifera, and Diabrotica barberi; the Mexican bean beetle Epilachna varivestis; the old house borer Hylotropes bajulus; the lucerne weevil Hypera postica; the shiny spider beetle Gibbium psylloides; the cigarette beetle Lasioderma serricorne; the Colorado potato beetle Leptinotarsa decemlineata; Lyctus beetles {Lyctus spp., the pollen beetle Meligethes aeneus; the common cockshafer Melolontha melolontha; the American spider beetle Mezium americanum; the golden spider beetle Niptus hololeuc s; the grain beetles Oryzaephilus surinamensis and Oryzaephilus Mercator; the black vine weevil Otiorhynchus sulcatus; the mustard beetle Phaedon cochleariae, the crucifer flea beetle Phyllotreta cruciferae; the striped flea beetle Phyllotreta striolata; the cabbage steam flea beetle Psylliodes chrysocephala; Ptinus spp. (spider beetles); the lesser grain borer Rhizopertha dominica; the pea and been weevil Sitona lineatus; the rice and granary beetles Sitophilus oryzae and Sitophilus granaries; the red sunflower seed weevil Smicronyx fulvus; the drugstore beetle Stegobium paniceum; the yellow mealworm beetle Tenebrio molitor, the flour beetles Tribolium castaneum and Tribolium confusum; warehouse and cabinet beetles {Trogoderma spp.); the sunflower beetle Zygogramma exclamationis; Dermaptera (earwigs) such as the European earwig Forficula auricularia and the striped earwig Labidura riparia; Dictyoptera such as the oriental cockroach Blatta orientalis; the greenhouse millipede Oxidus gracilis; the beet fly Pegomyia betae; the frit fly Oscinella frit; fruitflies (Dacus spp., Drosophila spp.); Isoptera (termites) including species from the familes Hodotermitidae, Kalotermitidae, Mastotermitidae, Rhinotermitidae, Serritermitidae, Termitidae, Termopsidae; the tarnished plant bug Lygus lineolaris; the black bean aphid Aphis fabae; the cotton or melon aphid Aphis gossypii; the green apple aphid Aphis pomi; the citrus spiny whitefly Aleurocanthus spiniferus; the sweet potato whitefly Bemesia tabaci; the cabbage aphid Brevicoryne brassicae; the pear psylla Cacopsylla pyricola; the currant aphid Cryptomyzus ribis; the grape phylloxera Daktulosphaira vitifoliae; the Citrus psylla Diaphorina citri; the potato leafhopper Empoasca fabae; the bean leafhopper Empoasca Solana; the vine leafhopper Empoasca vitis; the woolly aphid Eriosoma lanigerum; the European fruit scale Eulecanium corni; the mealy plum aphid Hyalopterus arundinis; the small brown planthopper Laodelphax striatellus; the potato aphid Macrosiphum euphorbiae; the green peach aphid Myzus persicae; the green rice leafhopper Nephotettix cinticeps; the brown planthopper Nilaparvata lugens; the hop aphid Phorodon humuli; the bird-cherry aphid Rhopalosiphum padi; the grain aphid Sitobion avenae; Lepidoptera such as Adoxophyes orana (summer fruit tortrix moth); Archips podana (fruit tree tortrix moth); Bucculatrix pyrivorella (pear leafminer); Bucculatrix thurberiella (cotton leaf perforator); Bupalus piniarius (pine looper); Carpocapsa pomonella (codling moth); Chilo suppressalis (striped rice borer); Choristoneura fumiferana (eastern spruce budworm); Cochylis hospes (banded sunflower moth); Diatraea grandiosella (southwestern corn borer); Eupoecilia ambiguella (European grape berry moth); Helicoverpa armigera (cotton bollworm); Helicoverpa zea (cotton bollworm); Heliothis vires cens (tobacco budworm), Homeosoma electellum (sunflower moth); Homona magnanima (oriental tea tree tortrix moth); Lithocolletis blancardella (spotted tentiform leafminer); Lymantria dispar (gypsy moth); Malacosoma neustria (tent caterpillar); Mamestra brassicae (cabbage armyworm); Mamestra configurata (Bertha armyworm); Operophtera brumata (winter moth); Ostrinia nubilalis (European corn borer), Panolis flammea (pine beauty moth), Phyllocnistis citrella (citrus leafminer); Pieris brassicae (cabbage white butterfly); Rachiplusia ni (soybean looper); Spodoptera exigua (beet armywonn); Spodoptera littoralis (cotton leafworm); Sylepta derogata (cotton leaf roller); Trichoplusia ni (cabbage looper); Orthoptera such as the common cricket Acheta domesticus, tree locusts (Anacridium spp.), the migratory locust Locusta migratoria, the twostriped grasshopper Melanoplus bivittatus, the differential grasshopper Melanoplus differ entialis, the redlegged grasshopper Melanoplus femurrubrum, the migratory grasshopper Melanoplus sanguinipes, the northern mole cricket Neocurtilla hexadectyla, the red locust Nomadacris septemfasciata, the shortwinged mole cricket Scapteriscus abbreviatus, the southern mole cricket Scapteriscus borellii, the tawny mole cricket Scapteriscus vicinus, and the desert locust Schistocerca gregaria; Symphyla such as the garden symphylan Scutigerella immaculata; Thysanoptera such as the tobacco thrips Frankliniella fusca, the flower thrips Frankliniella intonsa, the western flower thrips Frankliniella occidentalism the cotton bud thrips Frankliniella schultzei, the banded greenhouse thrips Hercinothrips femoralis, the soybean thrips Neohydatothrips variabilis, Kelly's Citrus thrips Pezothrips kellyanus, the avocado thrips Scirtothrips perseae, the melon thrips Thrips palmi, and the onion thrips Thrips tabaci; and the like, and combinations comprising one or more of the foregoing organisms.

[1279] In some embodiments, expression of one or more protein toxins (e.g., insecticidal proteins) in the phenyluracil herbicides-tolerant plants is effective for controlling flea beetles, i.e. members of the flea beetle tribe of family Chrysomelidae, preferably against Phyllotreta spp., such as Phyllotreta cruciferae and/or Phyllotreta triolata. In other embodiments, expression of one or more protein toxins {e.g., insecticidal proteins) in the phenyluracil herbicides-tolerant plants is effective for controlling cabbage seedpod weevil, the Bertha armyworm, Lygus bugs, or the diamondback moth.

[1280] Furthermore, in one embodiment, phenyluracil herbicides-tolerant plants are also covered which are, e.g. by the use of recombinant DNA techniques and/or by breeding and/or otherwise selected for such traits, rendered able to synthesize one or more proteins to increase the resistance or tolerance of those plants to bacterial, viral or fungal pathogens. The methods for producing such genetically modified plants are generally known to the person skilled in the art.

[1281] Furthermore, in another embodiment, phenyluracil herbicides-tolerant plants are also covered which are, e.g. by the use of recombinant DNA techniques and/or by breeding and/or otherwise selected for such traits, rendered able to synthesize one or more proteins to increase the productivity (e.g. oil content), tolerance to drought, salinity or other growth-limiting environmental factors or tolerance to pests and fungal, bacterial or viral pathogens of those plants.

[1282] Furthermore, in other embodiments, phenyluracil herbicides-tolerant plants are also covered which are, e.g. by the use of recombinant DNA techniques and/or by breeding and/or otherwise selected for such traits, altered to contain a modified amount of one or more substances or new substances, for example, to improve human or animal nutrition, e.g. oil crops that produce health-promoting long-chain omega-3 fatty acids or unsaturated omega-9 fatty acids (e.g. Nexera® rape, Dow Agro Sciences, Canada).

[1283] Furthermore, in some embodiments, phenyluracil herbicides-tolerant plants are also covered which are, e.g. by the use of recombinant DNA techniques and/or by breeding and/or otherwise selected for such traits, altered to contain increased amounts of vitamins and/or minerals, and/or improved profiles of nutraceutical compounds.

[1284] In one embodiment, phenyluracil herbicides-tolerant plants of the present invention, relative to a wild-type plant, comprise an increased amount of, or an improved profile of, a compound selected from the group consisting of: glucosinolates (e.g., glucoraphanin (4-methylsulfinylbutyl-glucosinolate), sulforaphane, 3-indolylmethyl-glucosinolate(glucobrassicin), I-methoxy-3-indolylmethyl-glucosinolate (neoglucobrassicin)); phenolics (e.g., flavonoids (e.g., quercetin, kaempferol), hydroxycinnamoyl derivatives (e.g., 1,2,2′-trisinapoylgentiobiose, 1,2-diferuloylgentiobiose, I,2′-disinapoyl-2-feruloylgentiobiose, 3-0-caffeoyl-quinic (neochlorogenic acid)); and vitamins and minerals (e.g., vitamin C, vitamin E, carotene, folic acid, niacin, riboflavin, thiamine, calcium, iron, magnesium, potassium, selenium, and zinc).

[1285] In another embodiment, phenyluracil herbicides-tolerant plants of the present invention, relative to a wild-type plant, comprise an increased amount of, or an improved profile of, a compound selected from the group consisting of: progoitrin; isothiocyanates; indoles (products of glucosinolate hydrolysis); glutathione; carotenoids such as beta-carotene, lycopene, and the xanthophyll carotenoids such as lutein and zeaxanthin; phenolics comprising the flavonoids such as the flavonols (e.g. quercetin, rutin), the flavans/tannins (such as the procyanidins comprising coumarin, proanthocyanidins, catechins, and anthocyanins); flavones; phytoestrogens such as coumestans, lignans, resveratrol, isoflavones e.g. genistein, daidzein, and glycitein; resorcyclic acid lactones; organosulphur compounds; phytosterols; terpenoids such as carnosol, rosmarinic acid, glycyrrhizin and saponins; chlorophyll; chlorphyllin, sugars, anthocyanins, and vanilla. In other embodiments, phenyluracil herbicides-tolerant plants of the present invention, relative to a wild-type plant, comprise an increased amount of, or an improved profile of, a compound selected from the group consisting of: vincristine, vinblastine, taxanes (e.g., taxol (paclitaxel), baccatin III, 10-desacetylbaccatin III, 10-desacetyl taxol, xylosyl taxol, 7-epitaxol, 7-epibaccatin III, 10-desacetylcephalomannine, 7-epicephalomannine, taxotere, cephalomannine, xylosyl cephalomannine, taxagifine, 8-benxoyloxy taxagifine, 9-acetyloxy taxusin, 9-hydroxy taxusin, taiwanxam, taxane Ia, taxane Ib, taxane Ic, taxane Id, GMP paclitaxel, 9-dihydro 13-acetylbaccatin III, 10-desacetyl-7-epitaxol, tetrahydrocannabinol (THC), cannabidiol (CBD), genistein, diadzein, codeine, morphine, quinine, shikonin, ajmalacine, serpentine, and the like.

[1286] It is to be understood that the plant of the present invention can comprise a wild type PPO nucleic acid in addition to a mutated PPO nucleic acid. It is contemplated that the phenyluracil herbicide tolerant lines may contain a mutation in only one of multiple PPO isoenzymes. Therefore, the present invention includes a plant comprising one or more mutated PPO nucleic acids in addition to one or more wild type PPO nucleic acids.

[1287] In another embodiment, the invention refers to a seed produced by a transgenic plant comprising a plant cell of the present invention, wherein the seed is true breeding for an increased resistance to a phenyluracil herbicide as compared to a wild type variety of the seed.

[1288] In another embodiment, the invention refers to a method of producing a transgenic plant cell with an increased resistance to a phenyluracil herbicide as compared to a wild type variety of the plant cell comprising, transforming the plant cell with an expression cassette comprising a mutated PPO nucleic acid.

[1289] In another embodiment, the invention refers to a method of producing a transgenic plant comprising, (a) transforming a plant cell with an expression cassette comprising a mutated PPO nucleic acid, and (b) generating a plant with an increased resistance to phenyluracil herbicide from the plant cell.

[1290] Consequently, mutated PPO nucleic acids of the invention are provided in expression cassettes for expression in the plant of interest. The cassette will include regulatory sequences operably linked to a mutated PPO nucleic acid sequence of the invention. The term “regulatory element” as used herein refers to a polynucleotide that is capable of regulating the transcription of an operably linked polynucleotide. It includes, but not limited to, promoters, enhancers, introns, 5′ UTRs, and 3′ UTRs. By “operably linked” is intended a functional linkage between a promoter and a second sequence, wherein the promoter sequence initiates and mediates transcription of the DNA sequence corresponding to the second sequence. Generally, operably linked means that the nucleic acid sequences being linked are contiguous and, where necessary to join two protein coding regions, contiguous and in the same reading frame. The cassette may additionally contain at least one additional gene to be cotransformed into the organism. Alternatively, the additional gene(s) can be provided on multiple expression cassettes.

[1291] In a preferred embodiment, the expression cassette comprises the sequence of SEQ ID NO: 240, 241, 242, 243, 244, 245, 246, 247, 248, 249, 250, 251, 252, 253, 254, 255, 256, 257, 258, 259, 260, 261, 262, or 264.

[1292] Such an expression cassette is provided with a plurality of restriction sites for insertion of the mutated PPO nucleic acid sequence to be under the transcriptional regulation of the regulatory regions. The expression cassette may additionally contain selectable marker genes.

[1293] The expression cassette of the present invention will include in the 5′-3′ direction of transcription, a transcriptional and translational initiation region (i.e., a promoter), a mutated PPO encoding nucleic acid sequence of the invention, and a transcriptional and translational termination region (i.e., termination region) functional in plants. The promoter may be native or analogous, or foreign or heterologous, to the plant host and/or to the mutated PPO nucleic acid sequence of the invention. Additionally, the promoter may be the natural sequence or alternatively a synthetic sequence. Where the promoter is “foreign” or “heterologous” to the plant host, it is intended that the promoter is not found in the native plant into which the promoter is introduced. Where the promoter is “foreign” or “heterologous” to the mutated PPO nucleic acid sequence of the invention, it is intended that the promoter is not the native or naturally occurring promoter for the operably linked mutated PPO nucleic acid sequence of the invention. As used herein, a chimeric gene comprises a coding sequence operably linked to a transcription initiation region that is heterologous to the coding sequence.

[1294] While it may be preferable to express the mutated PPO nucleic acids of the invention using heterologous promoters, the native promoter sequences may be used. Such constructs would change expression levels of the mutated PPO protein in the plant or plant cell. Thus, the phenotype of the plant or plant cell is altered.

[1295] The termination region may be native with the transcriptional initiation region, may be native with the operably linked mutated PPO sequence of interest, may be native with the plant host, or may be derived from another source (i.e., foreign or heterologous to the promoter, the mutated PPO nucleic acid sequence of interest, the plant host, or any combination thereof).

[1296] Convenient termination regions are available from the Ti-plasmid of A. tumefaciens, such as the octopine synthase and nopaline synthase termination regions. See also Guerineau et al. (1991) Mol. Gen. Genet. 262: 141-144; Proudfoot (1991) Cell 64:671-674; Sanfacon et al. (1991) Genes Dev. 5: 141-149; Mogen et al. (1990) Plant Cell 2: 1261-1272; Munroe et al. (1990) Gene 91: 151-158; Ballas t al. (1989) Nucleic Acids Res. 17:7891-7903; and Joshi et al. (1987) Nucleic Acid Res. 15:9627-9639. Where appropriate, the gene(s) may be optimized for increased expression in the transformed plant. That is, the genes can be synthesized using plant-preferred codons for improved expression. See, for example, Campbell and Gowri (1990) Plant Physiol. 92: 1-11 for a discussion of host-preferred codon usage. Methods are available in the art for synthesizing plant-preferred genes. See, for example, U.S. Pat. Nos. 5,380,831, and 5,436,391, and Murray et al. (1989) Nucleic Acids Res. 17:477-498, herein incorporated by reference.

[1297] Additional sequence modifications are known to enhance gene expression in a cellular host. These include elimination of sequences encoding spurious polyadenylation signals, exon-intron splice site signals, transposon-like repeats, and other such well-characterized sequences that may be deleterious to gene expression. The G-C content of the sequence may be adjusted to levels average for a given cellular host, as calculated by reference to known genes expressed in the host cell. When possible, the sequence is modified to avoid predicted hairpin secondary mRNA structures. Nucleotide sequences for enhancing gene expression can also be used in the plant expression vectors. These include the introns of the maize Adhl, intronl gene (Callis et al. Genes and Development 1: 1183-1200, 1987), and leader sequences, (W-sequence) from the Tobacco Mosaic virus (TMV), Maize Chlorotic Mottle Virus and Alfalfa Mosaic Virus (Gallie et al. Nucleic Acid Res. 15:8693-8711, 1987 and Skuzeski et al. Plant Mol. Biol. 15:65-79, 1990). The first intron from the shrunken-1 locus of maize, has been shown to increase expression of genes in chimeric gene constructs. U.S. Pat. Nos. 5,424,412 and 5,593,874 disclose the use of specific introns in gene expression constructs, and Gallie et al. (Plant Physiol. 106:929-939, 1994) also have shown that introns are useful for regulating gene expression on a tissue specific basis. To further enhance or to optimize mutated PPO gene expression, the plant expression vectors of the invention may also contain DNA sequences containing matrix attachment regions (MARs). Plant cells transformed with such modified expression systems, then, may exhibit overexpression or constitutive expression of a nucleotide sequence of the invention.

[1298] The expression cassettes of the present invention may additionally contain 5′ leader sequences in the expression cassette construct. Such leader sequences can act to enhance translation. Translation leaders are known in the art and include: picornavirus leaders, for example, EMCV leader (Encephalomyocarditis 5′ noncoding region) (Elroy-Stein et al. (1989) Proc. Natl. Acad. ScL USA 86:6126-6130); potyvirus leaders, for example, TEV leader (Tobacco Etch Virus) (Gallie et al. (1995) Gene 165(2):233-238), MDMV leader (Maize Dwarf Mosaic Virus) (Virology 154:9-20), and human immunoglobulin heavy-chain binding protein (BiP) (Macejak et al. (1991) Nature 353:90-94); untranslated leader from the coat protein mRNA of alfalfa mosaic virus (AMV RNA 4) (Jobling et al. (1987) Nature 325:622-625); tobacco mosaic virus leader (TMV) (Gallie et al. (1989) in Molecular Biology of RNA, ed. Cech (Liss, New York), pp. 237-256); and maize chlorotic mottle virus leader (MCMV) (Lommel et al. (1991) Virology 81:382-385). See also, Della-Cioppa et al. (1987) Plant Physiol. 84:965-968. Other methods known to enhance translation can also be utilized, for example, introns, and the like.

[1299] In preparing the expression cassette, the various DNA fragments may be manipulated, so as to provide for the DNA sequences in the proper orientation and, as appropriate, in the proper reading frame. Toward this end, adapters or linkers may be employed to join the DNA fragments or other manipulations may be involved to provide for convenient restriction sites, removal of superfluous DNA, removal of restriction sites, or the like. For this purpose, in vitro mutagenesis, primer repair, restriction, annealing, resubstitutions, e.g., transitions and trans versions, may be involved.

[1300] A number of promoters can be used in the practice of the invention. The promoters can be selected based on the desired outcome. The nucleic acids can be combined with constitutive, tissue-preferred, or other promoters for expression in plants. Such constitutive promoters include, for example, the core promoter of the Rsyn7 promoter and other constitutive promoters disclosed in WO 99/43838 and U.S. Pat. No. 6,072,050; the core CaMV 35S promoter (Odell et al. (1985) Nature 313:810-812); rice actin (McElroy et al. (1990) Plant Cell 2: 163-171); ubiquitin (Christensen et al. (1989) Plant Mol. Biol. 12:619-632 and Christensen et al. (1992) Plant Mol. Biol. 18:675-689); pEMU (Last et al. (1991) Theor. Appl. Genet. 81:581-588); MAS (Velten et al. (1984) EMBO J. 3:2723-2730); ALS promoter (U.S. Pat. No. 5,659,026), and the like. Other constitutive promoters include, for example, U.S. Pat. Nos. 5,608,149; 5,608,144; 5,604,121; 5,569,597; 5,466,785; 5,399,680; 5,268,463; 5,608,142; and 6,177,611.

[1301] Tissue-preferred promoters can be utilized to target enhanced mutated PPO expression within a particular plant tissue. Such tissue-preferred promoters include, but are not limited to, leaf-preferred promoters, root-preferred promoters, seed-preferred promoters, and stem-preferred promoters. Tissue-preferred promoters include Yamamoto et al. (1997) Plant J. 12(2):255-265; Kawamata et al. (1997) Plant Cell Physiol. 38(7):792-803; Hansen et al. (1997) Mol. Gen Genet. 254(3):337-343; Russell et al. (1997) Transgenic Res. 6(2): 157-168; Rinehart et al. (1996) Plant Physiol. 112(3): 1331-1341; Van Camp et al. (1996) Plant Physiol. 112(2):525-535; Canevascini et al. (1996) Plant Physiol. 112(2):513-524; Yamamoto et al. (1994) Plant Cell Physiol. 35(5):773-778; Lam (1994) Results Probl. Cell Differ. 20: 181-196; Orozco et al. (1993) Plant Mol Biol. 23(6): 1129-1138; Matsuoka e/[alpha]/. (1993) Proc Natl. Acad. Sci. USA 90(20):9586-9590; and Guevara-Garcia et al. (1993) Plant J. 4(3):495-505. Such promoters can be modified, if necessary, for weak expression. In one embodiment, the nucleic acids of interest are targeted to the chloroplast for expression. In this manner, where the nucleic acid of interest is not directly inserted into the chloroplast, the expression cassette will additionally contain a chloroplast-targeting sequence comprising a nucleotide sequence that encodes a chloroplast transit peptide to direct the gene product of interest to the chloroplasts. Such transit peptides are known in the art. With respect to chloroplast-targeting sequences, “operably linked” means that the nucleic acid sequence encoding a transit peptide (i.e., the chloroplast-targeting sequence) is linked to the mutated PPO nucleic acid of the invention such that the two sequences are contiguous and in the same reading frame. See, for example, Von Heijne et al. (1991) Plant Mol. Biol. Rep. 9: 104-126; Clark et al. (1989) J. Biol. Chem. 264:17544-17550; Della-Cioppa et al. (1987) Plant Physiol. 84:965-968; Romer et al. (1993) Biochem. Biophys. Res. Commun. 196:1414-1421; and Shah et al. (1986) Science 233:478-481. While the mutated PPO proteins of the invention include a native chloroplast transit peptide, any chloroplast transit peptide known in the art can be fused to the amino acid sequence of a mature mutated PPO protein of the invention by operably linking a choloroplast-targeting sequence to the 5′-end of a nucleotide sequence encoding a mature mutated PPO protein of the invention. Chloroplast targeting sequences are known in the art and include the chloroplast small subunit of ribulose-I,5-bisphosphate carboxylase (Rubisco) (de Castro Silva Filho et al. (1996) Plant Mol. Biol. 30:769-780; Schnell et al. (1991) J. Biol. Chem. 266(5):3335-3342); 5-(enolpyruvyl)shikimate-3-phosphate synthase (EPSPS) (Archer et al. (1990) J. Bioenerg. Biomemb. 22(6):789-810); tryptophan synthase (Zhao et al. (1995) J. Biol. Chem. 270(11):6081-6087); plastocyanin (Lawrence et al. (1997) J. Biol. Chem. 272(33):20357-20363); chorismate synthase (Schmidt et al. (1993) J. Biol. Chem. 268(36):27447-27457); and the light harvesting chlorophyll a/b binding protein (LHBP) (Lamppa et al. (1988) J. Biol. Chem. 263: 14996-14999). See also Von Heijne et al. (1991) Plant Mol. Biol. Rep. 9: 104-126; Clark et al. (1989) J. Biol. Chem. 264:17544-17550; Della-Cioppa et al. (1987) Plant Physiol. 84:965-968; Romer et al. (1993) Biochem. Biophys. Res. Commun. 196: 1414-1421; and Shah et al. (1986) Science 233:478-481.

[1302] In a preferred embodiment, the transit peptide comprises the amino acid sequence of SEQ ID NO: 129, 130, 131, 132, 133, 134, 135, 136, 137, 138, 139, 140, 141, 142, 143, 144, 145, 146, 147, 148, 149, 150, 151, 152, 153, 154, 155, 156, 157, 158, 159, 160, 161, 162, 163, 164, 165, 166, 167, 168, 169, 170, 171, 172, 173, 174, 175, 176, 177, 178, 179, 180, 181, 182, 183, 184, 185, 186, 187, 188, 189, 190, 191, 192, 193, 194, 195, 196, 197, 198, 199, 200, 201, 202, 203, 204, 205, 206, 207, 208, 209, 210, 211, 212, 213, 214, 215, 216, 217, 218, 219, 220, 221, 222, 223, 224, 225, 226.

[1303] Preferred expression cassettes comprise a transit peptide from Amaranthus PPO-2 fused to PPO or PPO like polypeptides, such as chimeric expression cassettes having the SEQ ID NO: 240, 241, 242, 243, 244, 245, 246, 247, 248, 249, 250, 251, 252, 253, 254, 255, 256, 257, 258, 259, 260, 261, 262, or 264

[1304] Methods for transformation of chloroplasts are known in the art. See, for example, Svab et al. (1990) Proc. Natl. Acad. ScL USA 87:8526-8530; Svab and Maliga (1993) Proc. Natl. Acad. Sci. USA 90:913-917; Svab and Maliga (1993) EMBO J. 12:601-606. The method relies on particle gun delivery of DNA containing a selectable marker and targeting of the DNA to the plastid genome through homologous recombination. Additionally, plastid transformation can be accomplished by transactivation of a silent plastid-borne transgene by tissue-preferred expression of a nuclear-encoded and plastid-directed RNA polymerase. Such a system has been reported in McBride et al. (1994) Proc. Natl. Acad. Sci. USA 91:7301-7305. The nucleic acids of interest to be targeted to the chloroplast may be optimized for expression in the chloroplast to account for differences in codon usage between the plant nucleus and this organelle. In this manner, the nucleic acids of interest may be synthesized using chloroplast-preferred codons. See, for example, U.S. Pat. No. 5,380,831, herein incorporated by reference.

[1305] In a preferred embodiment, the mutated PPO nucleic acid comprises a polynucleotide sequence selected from the group consisting of: a) a polynucleotide encoding a polypeptide as shown in SEQ ID NO: 1, 2, 3, 4, 5, 6, 7, 8, 9, 10, 11, 12, 13, 14, 15, 16, 17, 18, 19, 20, 21, 22, 23, 24, 25, 26, 27, 28, 29, 30, 31, 32, 33, 34, 35, 36, 37, 38, 39, 40, 41, 42, 43, 44, 45, 46, 47, 48, 49, 50, 51, 52, 53, 54, 55, 56, 57, 58, 59, 60, 61, 62, 63, 64, 65, 66, 67, 68, 69, 70, 71, 72, 73, 74, 75, 76, 77, 78, 79, 80, 81, 82, 83, 84, 85, 86, 87, 88, 89, 90, 91, 92, 93, 94, 95, 96, 97, 98, 99, 100, 101, 102, 103, 104, 105, 106, 107, 108, 109, 110, 111, 112, 113, 114, 115, 116, 117, 577, 579, 581, 583, 585, 587, 589, 591, 593, 595, 597, 599, 601, 603, 605, 607, 609, 611, 613, 615, 617, 619, 621, 623, 625, 627, 637, 265, 266, 267, 268, 269, 270, 271, 272, 273, 274, 275, 276, 277, 278, 279, 280, 281, 282, 283, 284, 285, 286, 287, 288, 289, 290, 291, 292, 293, 294, 295, 296, 297, 298, 299, 300, 301, 302, 303, 304, 305, 306, 307, 308, 309, 310, 311, 312, 313, 314, 315, 316, 317, 318, 319, 320, 321, 322, 323, 324, 325, 326, 327328, 329, 330, 331, 332, 333, 334, 335, 336, 337, 338, 339, 340, 341, 342, 343, 344, 345, 346, 347, 348, 349, 350, 351, 352, 353, 354, 355, 356, 357, 358, 359, 360, 361, 362, 363, 364, 365, 366, 367, 368, 369, 370, 371, 372, 373, 374, 375, 376, 377, 378, 379, 380, 381, 382, 383, 384, 385, 386, 387, 388, 389, 390, 391, 392, 393, 394, 395, 396, 397, 398, 399, 400, 401, 402, 403, 404, 405, 406, 407, 408, 409, 410, 411, 412, 413, 414, 415, 416, 417, 418, 419, 420, 421, 422, 423, 424, 425, 426, 427, 428, 429, 430, 431, 432, 433, 434, 435, 436, 437, 438, 439, 440, 441, 442, 443, 444, 445, 446, 447, 448, 449, 450, 451, 452, 453, 454, 455, 456, 457, 458, 459, 460, 461, 462, 463, 464, 465, 466, 467, 468, 469, 470, 471, 472, 473, 474, 475, 476, 477, 478, 479, 480, 481, 482, 483, 484, 485, 486, 487, 488, 489, 490, 491, 492, 493, 494, 495, 496, 497, 498, 499, 500, 501, 502, 503, 504, 505, 506, 507, 508, 509, 510, 511, 512, 513, 514, 515, 516, 517, 518, 519, 520, 521, 522, 523, 524, 525, 526, 527, 528, 529, 530, 531, 532, 533, 534, 535, 536, 537, 538, 539, 540, 541, 542, 543, 544, 545, 546, 547, 548, 549, 550, 551, 552, 553, 554, 555, 556, 557, 558, 559, 560, 561, 562, 563, 564, 565, 651; 652; 653; 654; 655; 656; 657; 658; 659; 660; 661; 662; 663; 664; 665; 666; 667; 668; 669; 670; 671, 714; 715; 716; 717; 718; 719; 720; 721; 722; 723; 724; 725; 726; 727; 728; 729; 730; 731; 732; 733; 734; 735; 736; 737; 738, 795, 882, 883, 884, 885, 886, 887, 888, 889, 890, 891, 892, 893, 894, 895, 896, 897, 898, 899, 900, 901, 902, 903, 904, 905, 906, 907, 908, 909, 910, 911, 912, 913, 914, 915, 916, 917, 918, 919, 920, 921, 922, 923, 924, 925, 926, 927, 928, 929, 930, 931, 932, 933, 934, 935, 936, 937, 938, 939, 940, 941, 942, 943, 944, 945, 946, 947, 948, 949, 950, 951, 952, 953, 954, 955, 956, 957, 958, 959, 960, or a variant or derivative thereof; b) a polynucleotide comprising at least 60 consecutive nucleotides of any of a); and c) a polynucleotide complementary to the polynucleotide of any of a) through b)

[1306] Preferably, the expression cassette of the present invention further comprises a transcription initiation regulatory region and a translation initiation regulatory region that are functional in the plant.

[1307] While the polynucleotides of the invention find use as selectable marker genes for plant transformation, the expression cassettes of the invention can include another selectable marker gene for the selection of transformed cells. Selectable marker genes, including those of the present invention, are utilized for the selection of transformed cells or tissues. Marker genes include, but are not limited to, genes encoding antibiotic resistance, such as those encoding neomycin phosphotransferase II (NEO) and hygromycin phosphotransferase (HPT), as well as genes conferring resistance to herbicidal compounds, such as glufosinate ammonium, bromoxynil, imidazolinones, and 2,4-dichlorophenoxyacetate (2,4-D). See generally, Yarranton (1992) Curr. Opin. Biotech. 3:506-511; Christophers on et al (1992) Proc. Natl. Acad. ScL USA 89:6314-6318; Yao et al. (1992) Cell 71:63-72; Reznikoff (1992) Mol Microbiol 6:2419-2422; Barkley et al (1980) in The Operon, pp. 177-220; Hu et al (1987) Cell 48:555-566; Brown et al (1987) Cell 49:603-612; Figge et al (1988) Cell 52:713-722; Deuschle et al (1989) Proc. Natl Acad. AcL USA 86:5400-5404; Fuerst et al (1989) Proc. Natl Acad. ScL USA 86:2549-2553; Deuschle et al (1990) Science 248:480-483; Gossen (1993) Ph.D. Thesis, University of Heidelberg; Reines et al (1993) Proc. Natl Acad. ScL USA 90: 1917-1921; Labow et al (1990) Mol Cell Biol 10:3343-3356; Zambretti et al (1992) Proc. Natl Acad. ScL USA 89:3952-3956; Bairn et al (1991) Proc. Natl Acad. ScL USA 88:5072-5076; Wyborski et al (1991) Nucleic Acids Res. 19:4647-4653; Hillenand-Wissman (1989) Topics Mol Struc. Biol 10: 143-162; Degenkolb et al (1991) Antimicrob. Agents Chemother. 35: 1591-1595; Kleinschnidt et al (1988) Biochemistry 27: 1094-1104; Bonin (1993) Ph.D. Thesis, University of Heidelberg; Gossen et al (1992) Proc. Natl Acad. ScL USA 89:5547-5551; Oliva et al (1992) Antimicrob. Agents Chemother. 36:913-919; Hlavka et al (1985) Handbook of Experimental Pharmacology, Vol. 78 (Springer-Verlag, Berlin); Gill et al (1988) Nature 334:721-724. Such disclosures are herein incorporated by reference. The above list of selectable marker genes is not meant to be limiting. Any selectable marker gene can be used in the present invention.

[1308] The invention further provides an isolated recombinant expression vector comprising the expression cassette containing a mutated PPO nucleic acid as described above, wherein expression of the vector in a host cell results in increased tolerance to a phenyluracil herbicide as compared to a wild type variety of the host cell. As used herein, the term “vector” refers to a nucleic acid molecule capable of transporting another nucleic acid to which it has been linked. One type of vector is a “plasmid,” which refers to a circular double stranded DNA loop into which additional DNA segments can be ligated. Another type of vector is a viral vector, wherein additional DNA segments can be ligated into the viral genome. Certain vectors are capable of autonomous replication in a host cell into which they are introduced (e.g., bacterial vectors having a bacterial origin of replication and episomal mammalian vectors). Other vectors (e.g., non-episomal mammalian vectors) are integrated into the genome of a host cell upon introduction into the host cell, and thereby are replicated along with the host genome. Moreover, certain vectors are capable of directing the expression of genes to which they are operatively linked. Such vectors are referred to herein as “expression vectors.” In general, expression vectors of utility in recombinant DNA techniques are often in the form of plasmids. In the present specification, “plasmid” and “vector” can be used interchangeably as the plasmid is the most commonly used form of vector. However, the invention is intended to include such other forms of expression vectors, such as viral vectors (e.g., replication defective retroviruses, adenoviruses, and adeno-associated viruses), which serve equivalent functions.

[1309] The recombinant expression vectors of the invention comprise a nucleic acid of the invention in a form suitable for expression of the nucleic acid in a host cell, which means that the recombinant expression vectors include one or more regulatory sequences, selected on the basis of the host cells to be used for expression, which is operably linked to the nucleic acid sequence to be expressed. Regulatory sequences include those that direct constitutive expression of a nucleotide sequence in many types of host cells and those that direct expression of the nucleotide sequence only in certain host cells or under certain conditions. It will be appreciated by those skilled in the art that the design of the expression vector can depend on such factors as the choice of the host cell to be transformed, the level of expression of polypeptide desired, etc. The expression vectors of the invention can be introduced into host cells to thereby produce polypeptides or peptides, including fusion polypeptides or peptides, encoded by nucleic acids as described herein (e.g., mutated PPO polypeptides, fusion polypeptides, etc.).

[1310] In a preferred embodiment of the present invention, the mutated PPO polypeptides are expressed in plants and plants cells such as unicellular plant cells (such as algae) (See Falciatore et al., 1999, Marine Biotechnology 1(3):239-251 and references therein) and plant cells from higher plants (e.g., the spermatophytes, such as crop plants). A mutated PPO polynucleotide may be “introduced” into a plant cell by any means, including transfection, transformation or transduction, electroporation, particle bombardment, agroinfection, biolistics, and the like.

[1311] Suitable methods for transforming or transfecting host cells including plant cells can be found in Sambrook et al. (Molecular Cloning: A Laboratory Manual. 2nd, ed., Cold Spring Harbor Laboratory, Cold Spring Harbor Laboratory Press, Cold Spring Harbor, NY, 1989) and other laboratory manuals such as Methods in Molecular Biology, 1995, Vol. 44, Agrobacterium protocols, ed: Gartland and Davey, Humana Press, Totowa, New Jersey. As increased tolerance to phenyluracil herbicides is a general trait wished to be inherited into a wide variety of plants like maize, wheat, rye, oat, triticale, rice, barley, soybean, peanut, cotton, rapeseed and canola, manihot, pepper, sunflower and tagetes, solanaceous plants like potato, tobacco, eggplant, and tomato, Vicia species, pea, alfalfa, bushy plants (coffee, cacao, tea), Salix species, trees (oil palm, coconut), perennial grasses, and forage crops, these crop plants are also preferred target plants for a genetic engineering as one further embodiment of the present invention. In a preferred embodiment, the plant is a crop plant. Forage crops include, but are not limited to, Wheatgrass, Canarygrass, Bromegrass, Wildrye Grass, Bluegrass, Orchardgrass, Alfalfa, Salfoin, Birdsfoot Trefoil, Alsike Clover, Red Clover, and Sweet Clover.

[1312] In one embodiment of the present invention, transfection of a mutated PPO polynucleotide into a plant is achieved by Agrobacterium mediated gene transfer. One transformation method known to those of skill in the art is the dipping of a flowering plant into an Agrobacteria solution, wherein the Agrobacteria contains the mutated PPO nucleic acid, followed by breeding of the transformed gametes. Agrobacterium mediated plant transformation can be performed using for example the GV3101(pMP90) (Koncz and Schell, 1986, Mol. Gen. Genet. 204:383-396) or LBA4404 (Clontech) Agrobacterium tumefaciens strain. Transformation can be performed by standard transformation and regeneration techniques (Deblaere et al., 1994, Nucl. Acids. Res. 13:4777-4788; Gelvin, Stanton B. and Schilperoort, Robert A, Plant Molecular Biology Manual, 2nd Ed. —Dordrecht: Kluwer Academic Publ., 1995. —in Sect., Ringbuc Zentrale Signatur: BT11-P ISBN 0-7923-2731-4; Glick, Bernard R. and Thompson, John E., Methods in Plant Molecular Biology and Biotechnology, Boca Raton: CRC Press, 1993 360 S., ISBN 0-8493-5164-2). For example, rapeseed can be transformed via cotyledon or hypocotyl transformation (Moloney et al., 1989, Plant Cell Report 8:238-242; De Block et al., 1989, Plant Physiol. 91:694-701). Use of antibiotics for Agrobacterium and plant selection depends on the binary vector and the Agrobacterium strain used for transformation. Rapeseed selection is normally performed using kanamycin as selectable plant marker. Agrobacterium mediated gene transfer to flax can be performed using, for example, a technique described by Mlynarova et al., 1994, Plant Cell Report 13:282-285. Additionally, transformation of soybean can be performed using for example a technique described in European Patent No. 0424 047, U.S. Pat. No. 5,322,783, European Patent No. 0397 687, U.S. Pat. No. 5,376,543, or U.S. Pat. No. 5,169,770. Transformation of maize can be achieved by particle bombardment, polyethylene glycol mediated DNA uptake, or via the silicon carbide fiber technique. (See, for example, Freeling and Walbot “The maize handbook” Springer Verlag: New York (1993) ISBN 3-540-97826-7). A specific example of maize transformation is found in U.S. Pat. No. 5,990,387, and a specific example of wheat transformation can be found in PCT Application No. WO 93/07256.

[1313] According to the present invention, the introduced mutated PPO polynucleotide may be maintained in the plant cell stably if it is incorporated into a non-chromosomal autonomous replicon or integrated into the plant chromosomes. Alternatively, the introduced mutated PPO polynucleotide may be present on an extra-chromosomal non-replicating vector and be transiently expressed or transiently active. In one embodiment, a homologous recombinant microorganism can be created wherein the mutated PPO polynucleotide is integrated into a chromosome, a vector is prepared which contains at least a portion of an PPO gene into which a deletion, addition, or substitution has been introduced to thereby alter, e.g., functionally disrupt, the endogenous PPO gene and to create a mutated PPO gene. To create a point mutation via homologous recombination, DNA-RNA hybrids can be used in a technique known as chimeraplasty (Cole-Strauss et al., 1999, Nucleic Acids Research 27(5):1323-1330 and Kmiec, 1999, Gene therapy American Scientist 87(3):240-247). Other homologous recombination procedures in Triticum species are also well known in the art and are contemplated for use herein.

[1314] In the homologous recombination vector, the mutated PPO gene can be flanked at its 5′ and 3′ ends by an additional nucleic acid molecule of the PPO gene to allow for homologous recombination to occur between the exogenous mutated PPO gene carried by the vector and an endogenous PPO gene, in a microorganism or plant. The additional flanking PPO nucleic acid molecule is of sufficient length for successful homologous recombination with the endogenous gene. Typically, several hundreds of base pairs up to kilobases of flanking DNA (both at the 5′ and 3′ ends) are included in the vector (see e.g., Thomas, K. R., and Capecchi, M. R., 1987, Cell 51:503 for a description of homologous recombination vectors or Strepp et al., 1998, PNAS, 95(8):4368-4373 for cDNA based recombination in Physcomitrella patens). However, since the mutated PPO gene normally differs from the PPO gene at very few amino acids, a flanking sequence is not always necessary. The homologous recombination vector is introduced into a microorganism or plant cell (e.g., via polyethylene glycol mediated DNA), and cells in which the introduced mutated PPO gene has homologously recombined with the endogenous PPO gene are selected using art-known techniques.

[1315] In another embodiment, recombinant microorganisms can be produced that contain selected systems that allow for regulated expression of the introduced gene. For example, inclusion of a mutated PPO gene on a vector placing it under control of the lac operon permits expression of the mutated PPO gene only in the presence of IPTG. Such regulatory systems are well known in the art.

[1316] Another aspect of the invention pertains to host cells into which a recombinant expression vector of the invention has been introduced. The terms “host cell” and “recombinant host cell” are used interchangeably herein. It is understood that such terms refer not only to the particular subject cell but they also apply to the progeny or potential progeny of such a cell. Because certain modifications may occur in succeeding generations due to either mutation or environmental influences, such progeny may not, in fact, be identical to the parent cell, but are still included within the scope of the term as used herein. A host cell can be any prokaryotic or eukaryotic cell. For example, a mutated PPO polynucleotide can be expressed in bacterial cells such as C. glutamicum, insect cells, fungal cells, or mammalian cells (such as Chinese hamster ovary cells (CHO) or COS cells), algae, ciliates, plant cells, fungi or other microorganisms like C. glutamicum. Other suitable host cells are known to those skilled in the art.

[1317] A host cell of the invention, such as a prokaryotic or eukaryotic host cell in culture, can be used to produce (i.e., express) a mutated PPO polynucleotide. Accordingly, the invention further provides methods for producing mutated PPO polypeptides using the host cells of the invention. In one embodiment, the method comprises culturing the host cell of invention (into which a recombinant expression vector encoding a mutated PPO polypeptide has been introduced, or into which genome has been introduced a gene encoding a wild-type or mutated PPO polypeptide) in a suitable medium until mutated PPO polypeptide is produced. In another embodiment, the method further comprises isolating mutated PPO polypeptides from the medium or the host cell. Another aspect of the invention pertains to isolated mutated PPO polypeptides, and biologically active portions thereof. An “isolated” or “purified” polypeptide or biologically active portion thereof is free of some of the cellular material when produced by recombinant DNA techniques, or chemical precursors or other chemicals when chemically synthesized. The language “substantially free of cellular material” includes preparations of mutated PPO polypeptide in which the polypeptide is separated from some of the cellular components of the cells in which it is naturally or recombinantly produced. In one embodiment, the language “substantially free of cellular material” includes preparations of a mutated PPO polypeptide having less than about 30% (by dry weight) of non-mutated PPO material (also referred to herein as a “contaminating polypeptide”), more preferably less than about 20% of non-mutated PPO material, still more preferably less than about 10% of non-mutated PPO material, and most preferably less than about 5% non-mutated PPO material.

[1318] When the mutated PPO polypeptide, or biologically active portion thereof, is recombinantly produced, it is also preferably substantially free of culture medium, i.e., culture medium represents less than about 20%, more preferably less than about 10%, and most preferably less than about 5% of the volume of the polypeptide preparation. The language “substantially free of chemical precursors or other chemicals” includes preparations of mutated PPO polypeptide in which the polypeptide is separated from chemical precursors or other chemicals that are involved in the synthesis of the polypeptide. In one embodiment, the language “substantially free of chemical precursors or other chemicals” includes preparations of a mutated PPO polypeptide having less than about 30% (by dry weight) of chemical precursors or non-mutated PPO chemicals, more preferably less than about 20% chemical precursors or non-mutated PPO chemicals, still more preferably less than about 10% chemical precursors or non-mutated PPO chemicals, and most preferably less than about 5% chemical precursors or non-mutated PPO chemicals. In preferred embodiments, isolated polypeptides, or biologically active portions thereof, lack contaminating polypeptides from the same organism from which the mutated PPO polypeptide is derived. Typically, such polypeptides are produced by recombinant expression of, for example, a mutated PPO polypeptide in plants other than, or in microorganisms such as C. glutamicum, ciliates, algae, or fungi.

[1319] In other aspects, a method for treating a plant of the present invention is provided.

[1320] In some embodiments, the method comprises contacting the plant with an agronomically acceptable composition.

[1321] In another aspect, the present invention provides a method for preparing a descendent seed. The method comprises planting a seed of or capable of producing a plant of the present invention. In one embodiment, the method further comprises growing a descendent plant from the seed; and harvesting a descendant seed from the descendent plant. In other embodiments, the method further comprises applying a phenyluracil herbicides herbicidal composition to the descendent plant.

[1322] In another embodiment, the invention refers to harvestable parts of the transgenic plant according to the present invention, Preferably, the harvestable parts comprise the PPO nucleic acid or PPO protein of the present invention. The harvestable parts may be seeds, roots, leaves and/or flowers comprising the PPO nucleic acid or PPO protein or parts thereof. Preferred parts of soy plants are soy beans comprising the PPO nucleic acid or PPO protein.

[1323] In another embodiment, the invention refers to products derived from a plant according to the present invention, parts thereof or harvestable parts thereof. A preferred plant product is fodder, seed meal, oil, or seed-treatment-coated seeds. Preferably, the meal and/or oil comprises the mutated PPO nucleic acids or PPO proteins of the present invention.

[1324] In another embodiment, the invention refers to a method for the production of a product, which method comprises
[1325] a) growing the plants of the invention or obtainable by the methods of invention and
[1326] b) producing said product from or by the plants of the invention and/or parts, e.g. seeds, of these plants.

[1327] In a further embodiment the method comprises the steps
[1328] a) growing the plants of the invention,
[1329] b) removing the harvestable parts as defined above from the plants and
[1330] c) producing said product from or by the harvestable parts of the invention.

[1331] The product may be produced at the site where the plant has been grown, the plants and/or parts thereof may be removed from the site where the plants have been grown to produce the product. Typically, the plant is grown, the desired harvestable parts are removed from the plant, if feasible in repeated cycles, and the product made from the harvestable parts of the plant. The step of growing the plant may be performed only once each time the methods of the invention is performed, while allowing repeated times the steps of product production e.g. by repeated removal of harvestable parts of the plants of the invention and if necessary further processing of these parts to arrive at the product. It is also possible that the step of growing the plants of the invention is repeated and plants or harvestable parts are stored until the production of the product is then performed once for the accumulated plants or plant parts. Also, the steps of growing the plants and producing the product may be performed with an overlap in time, even simultaneously to a large extend or sequentially. Generally the plants are grown for some time before the product is produced.

[1332] In one embodiment the products produced by said methods of the invention are plant products such as, but not limited to, a foodstuff, feedstuff, a food supplement, feed supplement, fiber, cosmetic and/or pharmaceutical. Foodstuffs are regarded as compositions used for nutrition and/or for supplementing nutrition. Animal feedstuffs and animal feed supplements, in particular, are regarded as foodstuffs.

[1333] In another embodiment the inventive methods for the production are used to make agricultural products such as, but not limited to, plant extracts, proteins, amino acids, carbohydrates, fats, oils, polymers, vitamins, and the like.

[1334] It is possible that a plant product consists of one or more agricultural products to a large extent.

[1335] As described above, the present invention teaches compositions and methods for increasing the PPO-inhibiting tolerance of a crop plant or seed as compared to a wild-type variety of the plant or seed. In a preferred embodiment, the PPO-inhibiting tolerance of a crop plant or seed is increased such that the plant or seed can withstand a phenyluracil herbicide application of preferably approximately 1-1000 g ai ha⁻¹, more preferably 1-200 g ai ha⁻¹, even more preferably 5-150 g ai ha⁻¹, and most preferably 10-100 g ai ha⁻¹. As used herein, to “withstand” a phenyluracil herbicide application means that the plant is either not killed or only moderately injured by such application. It will be understood by the person skilled in the art that the application rates may vary, depending on the environmental conditions such as temperature or humidity, and depending on the chosen kind of herbicide (active ingredient ai).

[1336] Furthermore, the present invention provides methods that involve the use of at least one phenyluracil herbicide, optionally in combination with one or more herbicidal compounds B, and, optionally, a safener C, as described in detail supra.

[1337] In these methods, the phenyluracil herbicide can be applied by any method known in the art including, but not limited to, seed treatment, soil treatment, and foliar treatment. Prior to application, the phenyluracil herbicide can be converted into the customary formulations, for example solutions, emulsions, suspensions, dusts, powders, pastes and granules. The use form depends on the particular intended purpose; in each case, it should ensure a fine and even distribution of the compound according to the invention.

[1338] By providing plants having increased tolerance to phenyluracil herbicide, a wide variety of formulations can be employed for protecting plants from weeds, so as to enhance plant growth and reduce competition for nutrients. A phenyluracil herbicide can be used by itself for pre-emergence, post-emergence, pre-planting, and at-planting control of weeds in areas surrounding the crop plants described herein, or a phenyluracil herbicide formulation can be used that contains other additives. The phenyluracil herbicide can also be used as a seed treatment. Additives found in a phenyluracil herbicide formulation include other herbicides, detergents, adjuvants, spreading agents, sticking agents, stabilizing agents, or the like. The phenyluracil herbicide formulation can be a wet or dry preparation and can include, but is not limited to, flowable powders, emulsifiable concentrates, and liquid concentrates. The phenyluracil herbicide and herbicide formulations can be applied in accordance with conventional methods, for example, by spraying, irrigation, dusting, or the like.

[1339] Suitable formulations are described in detail in PCT/EP2009/063387 and PCT/EP2009/063386, which are incorporated herein by reference.

[1340] It should also be understood that the foregoing relates to preferred embodiments of the present invention and that numerous changes may be made therein without departing from the scope of the invention. The invention is further illustrated by the following examples, which are not to be construed in any way as imposing limitations upon the scope thereof. On the contrary, it is to be clearly understood that resort may be had to various other embodiments, modifications, and equivalents thereof, which, after reading the description herein, may suggest themselves to those skilled in the art without departing from the spirit of the present invention and/or the scope of the appended claims.

### EXAMPLES

Legend to the Phenyluracils According to the Present Invention which were Used in the Following Examples

| | |
|---|---|
| Phenyluracil 1 | methyl 2-[2-[2-bromo-4-fluoro-5-[3-methyl-2,6-dioxo-4- |
| | (trifluoromethyl)pyrimidin-1-yl]phenoxy]phenoxy]-2-methoxy-acetate |
| Phenyluracil 2 | ethyl 2-[2-[2-bromo-4-fluoro-5-[3-methyl-2,6-dioxo-4- |
| | (trifluoromethyl)pyrimidin-1-yl]phenoxy]phenoxy]-2-methoxy-acetate |
| Phenyluracil 3 | 2-[2-[2-bromo-4-fluoro-5-[3-methyl-2,6-dioxo-4-(trifluoromethyl)pyrimidin- |
| | 1-yl]phenoxy]phenoxy]-2-methoxy-acetic acid |

### Example 1: Site-Directed Mutagenesis PPO

[1341] All nucleic acid coding sequence and all single and double mutants encoding a herbicide tolerant PPO polypeptides are synthesized and cloned by Geneart (Geneart AG, Regensburg, Germany). Rational design mutants are synthesized by Geneart. Random PPO gene libraries are synthesized by Geneart. Plasmids are isolated from E. coli TOP10 by performing a plasmid minpreparation and confirmed by DNA sequencing.

### Example 2: Expression and Purification of Recombinant Wildtype and Mutant PPO

[1342] (Taken from: Franck E. Dayan, Pankaj R. Daga, Stephen O. Duke, Ryan M. Lee, Patrick J. Tranel, Robert J. Doerksen. Biochemical and structural consequences of a glycine deletion in the α-8 helix of protoporphyrinogen oxidase. Biochimica et Biophysica Acta 1804 (2010), 1548-56) Clones in pRSET vector are transformed into BL21(DE3)-pLysS strain of E. coli. Cells are grown in 250 mL of LB with 100 μgmL-1 of carbenicillin, shaking overnight at 37° C. Cultures are diluted in 1 L of LB with antibiotic and grown at 37° C. shaking for 2 h, induced with 1 mM IPTG and grown at 25° C. shaking for 5 more hours. The cells are harvested by centrifugation at 1600×g, washed with 0.09% NaCl, and stored at −80° C. Cells are lysed using a French press at 140 MPa in 50 mM sodium phosphate pH 7.5, 1 M NaCl, 5 mM imidazole, 5% glycerol, and 1 μg mL-1 leupeptin. Following lysis, 0.5 U of benzonase (Novagen, EMD Chemicals, Inc., Gibbstown, NJ) and PMSF (final concentration of 1 mM) are added. Cell debris is removed by centrifugation at 3000×g. His-tagged PPO proteins are purified on a nickel activated Hitrap Chelating HP column (GE Healthcare Bio-Sciences Corp., Piscataway, NJ) equilibrated with 20 mM sodium phosphate pH 8.0, 50 mM NaCl, 5 mM imidazole, 5 mM MgCl2, 0.1 mM EDTA, and 17% glycerol. PPO is eluted with 250 mM imidazole. The active protein is desalted on a PD-10 column (GE Healthcare Bio-Sciences Corp., Piscataway, NJ) equilibrated with a 20 mM sodium phosphate buffer, pH 7.5, 5 mM MgCl2, 1 mM EDTA and 17% glycerol. Each litre of culture provided approximately 10 mg of pure PPO, which is stored at −20° C. until being used in assays.

### Example 3: PPO Enzyme Assay (Non-Recombinant)

[1343] PPO protein (EC 1.3.3.4) is extracted from coleoptiles or shoots (150 g fresh weight) of dark-grown corn, black nightshade, morning glory, and velvetleaf seedlings as described previously (Grossmann et al. 2010). Before harvesting, the seedlings are allowed to green for 2 hours in the light in order to achieve the highest specific enzyme activities in the thylakoid fractions at low chlorophyll concentrations. At high chlorophyll concentrations significant quenching of fluorescence occurs, which limits the amount of green thylakoids that can be used in the test. Plant materials are homogenized in the cold with a Braun blender using a fresh-weight-to-volume ratio of 1:4. Homogenization buffer consisted of tris(hydroxymethyl)aminomethane (Tris)-HCl (50 mM; pH 7.3), sucrose (0.5 M), magnesium chloride (1 mM), ethylenediaminetetraacetic acid (EDTA) (1 mM) and bovine serum albumin (2 g L⁻¹). After filtration through four layers of Miracloth, crude plastid preparations are obtained after centrifugation at 10 000×g for 5 min and resuspension in homogenization buffer before centrifugation at 150×g for 2 min to remove crude cell debris. The supernatant is centrifuged at 4000×g for 15 min and the pellet fraction is resuspended in 1 ml of a buffer containing Tris-HCl (50 mM; pH 7.3), EDTA (2 mM), leupeptin (2 μM), pepstatin (2 μM) and glycerol (200 ml L⁻¹) and stored at −80° C. until use. Protein is determined in the enzyme extract with bovine serum albumin as a standard. PPO activity is assayed fluorometrically by monitoring the rate of Proto formation from chemically reduced protoporphyrinogen IX under initial velocity conditions. The assay mixture consisted of Tris-HCl (100 mM; pH 7.3), EDTA (1 mM), dithiothreitol (5 mM), Tween 80 (0.085%), protoporphyrinogen IX (2 μM), and 40 μg extracted protein in a total volume of 200 μl. The reaction is initiated by addition of substrate protoporphyrinogen IX at 22° C. The phenyluracils disclosed SUPRA, and photosynthesis inhibitor diuron as negative control are prepared in dimethyl sulfoxide (DMSO) solution (0.1 mM concentration of DMSO in the assay) and added to the assay mixture in concentrations of 0.005 pM to 5 μM before incubation. Fluorescence is monitored directly from the assay mixture using a POLARstar Optima/Galaxy (BMG) with excitation at 405 nm and emission monitored at 630 nm. Non-enzymatic activity in the presence of heat-inactivated extract is negligible. Inhibition of enzyme activity induced by the herbicide is expressed as percentage inhibition relative to untreated controls. Molar concentrations of compound required for 50% enzyme inhibition (IC₅₀ values) are calculated by fitting the values to the dose-response equation using non-linear regression analysis.

### Example 4: PPO Enzyme Assay (Recombinant)

[1344] Proto is purchased from Sigma-Aldrich (Milwaukee, WI). Protogen is prepared according to Jacobs and Jacobs (N. J. Jacobs, J. M. Jacobs, Assay for enzymatic protoporphyrinogen oxidation, a late step in heme synthesis, Enzyme 28 (1982) 206-219). Assays are conducted in 100 mM sodium phosphate pH 7.4 with 0.1 mM EDTA, 0.1% Tween 20, 5 μM FAD, and 500 mM imidazole. Dose-response curves with the phenyluracils disclosed SUPRA, and photosynthesis inhibitor diuron as negative control, and MC-15608 are obtained in the presence of 150 μM Protogen. The excitation and emission bandwidths are set at 1.5 and 30 nm, respectively. All assays are made in duplicates or triplicates and measured using a POLARstar Optima/Galaxy (BMG) with excitation at 405 nm and emission monitored at 630 nm. Molar concentrations of compound required for 50% enzyme inhibition (IC₅₀ values) are calculated by fitting the values to the dose-response equation using non-linear regression analysis. The results are shown in Table x1-x3

### X1)phenyluracil 1

| Amaranthus | Based ob SEQ ID NO: 1 |
|---|---|
| IC50 | Variant |
| 7.16E−10 | WT |
| 3.57E−07 | L397Q, F420M |
| 3.54E−07 | L397Q, F420M |
| 5.79E−06 | L397E-F420V |
| 5.45E−06 | L397E-F420V |
| 1.00E−05 | AMATU G398A F420L |
| 1.00E−05 | AMATU G398A F420L |

### X2)phenyluracil 2

| Variant based on SEQ ID NO: 1 | IC50 |
|---|---|
| PPO AMATU WT | 3.23E−10 |
| PPO2 AMATU L397Q, F420M | 1.59E−07 |
| PPO2 AMATU L397E, F420V | 6.79E−06 |

### X3)phenyluracil 3

| Amaranthus | Based on SEQ ID NO: 1 |
|---|---|
| IC50 | Variant |
| 1.43E−07 | 397Q-420M |
| 2.81E−06 | 397E, 420V |
| 1.83E−10 | AMATU WT |

### Example 5: Engineering PPO-Derivative Herbicide Tolerant Plants Having Wildtype or Mutated PPO Sequences

[1345] PPO-derivative herbicide tolerant soybean (Glycine max), plants are produced by a method as described by Olhoft et al. (US patent 2009/0049567). For transformation of soybean or Arabidopsis thaliana, Wildtype or Mutated PPO sequences encoding herbicide tolerant PPO polypeptides are cloned with standard cloning techniques as described in Sambrook et al. (Molecular cloning (2001) Cold Spring Harbor Laboratory Press) in a binary vector containing resistance marker gene cassette (AHAS) and mutated PPO sequence (marked as GOI) in between ubiquitin promoter (PcUbi) and nopaline synthase terminator (NOS) sequence. For corn transformation, Wildtype or Mutated PPO sequences are cloned with standard cloning techniques as described in Sambrook et al. (Molecular cloning (2001) Cold Spring Harbor Laboratory Press) in a binary vector containing resistance marker gene cassette (AHAS) and mutated PPO sequence (marked as GOI) in between corn ubiquitin promoter (ZmUbi) and nopaline synthase terminator (NOS) sequence. Binary plasmids are introduced to Agrobacterium tumefaciens for plant transformation. Plasmid constructs are introduced into soybean's axillary meristem cells at the primary node of seedling explants via Agrobacterium-mediated transformation. After inoculation and co-cultivation with Agrobacteria, the explants are transferred to shoot introduction media without selection for one week. The explants are subsequently transferred to a shoot induction medium with 1-3 μM imazapyr (Arsenal) for 3 weeks to select for transformed cells. Explants with healthy callus/shoot pads at the primary node are then transferred to shoot elongation medium containing 1-3 μM imazapyr until a shoot elongated or the explant died. Transgenic plantlets are rooted, subjected to TaqMan analysis for the presence of the transgene, transferred to soil and grown to maturity in greenhouse. Plant transformation vector constructs containing mutated PPO sequences are introduced into maize immature embryos via Agrobacterium-mediated transformation according to the procedure outlined in Peng et al. (WO2006/136596).

[1346] Transformed cells are selected in selection media supplemented with 0.5-1.5 μM imazethapyr for 3-4 weeks. Transgenic plantlets are regenerated on plant regeneration media and rooted afterwards. Transgenic plantlets are subjected to TaqMan analysis for the presence of the transgene before being transplanted to potting mixture and grown to maturity in greenhouse. Arabidopsis thaliana are transformed with wildtype or mutated PPO sequences by floral dip method as described by McElver and Singh (WO 2008/124495). Transgenic Arabidopsis plants are subjected to TaqMan analysis for analysis of the number of integration loci. Transformation of Oryza sativa (rice) are done by protoplast transformation as described by Peng et al. (U.S. Pat. No. 6,653,529) T0 or T1 transgenic plants of soybean, corn, and rice containing mutated PPO sequences are tested for improved tolerance to PPO-derived herbicides in greenhouse studies and mini-plot studies with the phenyluracils disclosed SUPRA, and photosynthesis inhibitor diuron as negative control.

### Example 6: Tissue Culture Conditions

[1347] An in vitro tissue culture mutagenesis assay has been developed to isolate and characterize plant tissue (e.g., maize, rice tissue) that is tolerant to protoporphyrinogen oxidase inhibiting herbicides, e.g. the phenyluracils disclosed SUPRA, and photosynthesis inhibitor diuron as negative control). The assay utilizes the somaclonal variation that is found in in vitro tissue culture. Spontaneous mutations derived from somaclonal variation can be enhanced by treatment with a chemical mutagen (e.g. Ethyl methanesulfonate, N-ethyl-N-nitrosourea, N-Nitroso-N-methylurea) and subsequent selection in a stepwise manner, on increasing concentrations of herbicide.

[1348] The present invention provides tissue culture conditions for encouraging growth of friable, embryogenic maize or rice callus that is regenerable. Calli are initiated from rice cultivar Indica (Indica I). Seeds are surface sterilized in 70% ethanol for approximately I min followed by 20% commercial Clorox bleach for 20 minutes. Seeds are rinsed with sterile water and plated on R001M media. The ingredient lists for the media tested are presented in Table y.

TABLE y

| Ingredients | Supplier | R001M | R025M | R026M | R327M | R008S |
|---|---|---|---|---|---|---|
| N6 Salts | Phytotech | 4 g/L | 4 g/L | 4.3 g/L | 4.3 g/L | 3.25 g/L |
| N6 | Phytotech | 1X | 1X | 1X | 1X | |
| vitamins | | | | | | |
| Maltose | VWR | 30 g/L | 30 g/L | 30 g/L | 30 g/L | |
| Casamino | BD | 0.3 g/L | 0.3 g/L | 2 g/L | | |
| Acid | | | | | | |
| Proline | Sigma | 2.9 g/L | 0.5 g/L | | | |
| 2,4-D | ICN | 2 mg/L | | | | |
| MES | Sigma | 0.5 g/L | 0.5 g/L | 0.5 g/L | 0.5 g/L | 0.5 g/L |
| MS Salts | Phytotech | | | | | |
| MS | Phytotech | | | | | |
| Vitamins | | | | | | |
| Sorbitol | Sigma | | | 30 g/L | | |
| Sucrose | Sigma | | | | | 20 g/L |
| Nicotinic | Sigma | | | | | 0.5 mg/L |
| Acid | | | | | | |
| Pyridoxine | Sigma | | | | | 0.5 mg/L |
| HCL | | | | | | |
| Thiamine | Sigma | | | | | 1 mg/L |
| HCL | | | | | | |
| Myo- | Sigma | | | | | 0.1 g/L |
| inositol | | | | | | |

R001M callus induction media is selected after testing numerous variations. Cultures are kept in the dark at 30° C. Embryogenic callus is subcultured to fresh media after 10-14 days.

### Example 7: Selection of Herbicide-Tolerant Calli

[1349] Once tissue culture conditions are determined, further establishment of selection conditions are established through the analysis of tissue survival in kill curves with saflufenacil, trifludimoxazin, sulfentrazone, and the phenyluracils disclosed SUPRA, and photosynthesis inhibitor diuron as negative control. Careful consideration of accumulation of the herbicide in the tissue, as well as its persistence and stability in the cells and the culture media is performed. Through these experiments, a sub-lethal dose has been established for the initial selection of mutated material. After the establishment of the starting dose of phenyluracils disclosed SUPRA, and photosynthesis inhibitor diuron as negative control in selection media, the tissues are selected in a step-wise fashion by increasing the concentration of the PPO inhibitor with each transfer until cells are recovered that grew vigorously in the presence of toxic doses. The resulting calli are further subcultured every 3-4 weeks to R001M with selective agent. Over 26,000 calli are subjected to selection for 4-5 subcultures until the selective pressure is above toxic levels as determined by kill curves and observations of continued culture. Alternatively, liquid cultures initiated from calli in MS711R with slow shaking and weekly subcultures. Once liquid cultures are established, selection agent is added directly to the flask at each subculture. Following 2-4 rounds of liquid selection, cultures are transferred to filters on solid R001M media for further growth.

### Example 8: Regeneration of Plants

[1350] Tolerant tissue, e.g. rice tissue, is regenerated and characterized molecularly for PPO gene, e.g. PPO2 sequence mutations and/or biochemically for altered PPO activity in the presence of the selective agent. In addition, genes involved directly and/or indirectly in tetrapyrrole biosynthesis and/or metabolism pathways are also sequenced to characterize mutations. Finally, enzymes that change the fate (e.g. metabolism, translocation, transportation) are also sequence to characterized mutations. Following herbicide selection, calli are regenerated using a media regime of R025M for 10-14 days, R026M for ca. 2 weeks, R327M until well formed shoots are developed, and R008S until shoots are well rooted for transfer to the greenhouse. Regeneration is carried out in the light. No selection agent is included during regeneration. Once strong roots are established, M0 regenerants are transplant to the greenhouse in square or round pots. Transplants are maintained under a clear plastic cup until they are adapted to greenhouse conditions. The greenhouse is set to a day/night cycle of 27° C./21° C. (80° F./70° F.) with 600 W high pressure sodium lights supplementing light to maintain a 14 hour day length. Plants are watered according to need, depending in the weather and fertilized daily.

### Example 9: Sequence Analysis

[1351] Leaf tissue is collected from clonal plants separated for transplanting and analyzed as individuals. Genomic DNA is extracted using a Chloropure Nucleic acid extraction kit (Agencourt, U.S. Pat. Nos. 5,898,071; 5,705,628; 6,534,262) as directed by the manufacturer. Isolated DNA is PCR amplified using the appropriate forward and reverse primer.

[1352] PCR amplification is performed using LongAmp HotStart Taq DNA Polymerase Mix (New England Biolabs) using thermocycling program as follows: 94° C. for 30 sec, followed by 35 cycles (94° C., 30 sec; 54° C., 30 sec; 65° C., 300 sec), 10 min at 65° C.

[1353] PCR products are verified for concentration and fragment size via agarose gel electrophoresis. Dephosphorylated PCR products are analyzed by direct sequence using the PCR primers (Genewiz or GenScript). Chromatogram trace files (.scf) are analyzed for mutation relative to the wild-type gene using Sequencher (Gene Codes) or Vector NTI Advance 10™ (Invitrogen). Based on sequence information, mutations are identified in several individuals. Sequence analysis is performed on the representative chromatograms and corresponding alignment with default settings and edited to call secondary peaks.

### Example 10: Demonstration of Herbicide-Tolerance

[1354] T0 or T1 transgenic plant of soybean, corn, Canola varieties and rice containing PPO1 and or PPO2 sequences are tested for improved tolerance to herbicides in greenhouse studies and mini-plot studies with the phenyluracils disclosed SUPRA, and optionally photosynthesis inhibitor diuron as negative control. For the pre-emergence treatment, the herbicides are applied directly after sowing by means of finely distributing nozzles. The containers are irrigated gently to promote germination and growth and subsequently covered with transparent plastic hoods until the plants have rooted. This cover causes uniform germination of the test plants, unless this has been impaired by the herbicides. For post emergence treatment, the test plants are first grown to a height of 3 to 15 cm, depending on the plant habit, and only then treated with the herbicides. For this purpose, the test plants are either sown directly, and grown in the same containers or they are first grown separately and transplanted into the test containers a few days prior to treatment.

[1355] For testing of T0 plants, cuttings can be used. In the case of soybean plants, an optimal shoot for cutting is about 7.5 to 10 cm tall, with at least two nodes present. Each cutting is taken from the original transformant (mother plant) and dipped into rooting hormone powder (indole-3-butyric acid, IBA). The cutting is then placed in oasis wedges inside a bio-dome. Wild type cuttings are also taken simultaneously to serve as controls. The cuttings are kept in the bio-dome for 5-7 days and then transplanted to pots and then acclimated in the growth chamber for two more days. Subsequently, the cuttings are transferred to the greenhouse, acclimated for approximately 4 days, and then subjected to spray tests as indicated. Depending on the species, the plants are kept at 10-25° C. or 20-35° C. The test period extends over 3 weeks. During this time, the plants are tended and their response to the individual treatments is evaluated. Herbicide injury evaluations are taken at 2 and 3 weeks after treatment. Plant injury is rated on a scale of 0% to 100%, 0% being no injury and 100% being complete death.

[1356] Transgenic Arabidopsis thaliana plants can be assayed for improved tolerance to the phenyluracils disclosed SUPRA, in 48-well plates. Therefore, T2 seeds are surface sterilized by stirring for 5 min in ethanol+water (70+30 by volume), rinsing one time with ethanol+water (70+30 by volume) and two times with sterile, deionized water. The seeds are resuspended in 0.1% agar dissolved in water (w/v) Four to five seeds per well are plated on solid nutrient medium consisting of half-strength murashige skoog nutrient solution, pH 5.8 (Murashige and Skoog (1962) Physiologia Plantarum 15: 473-497). Compounds are dissolved in dimethylsulfoxid (DMSO) and added to the medium prior solidification (final DMSO concentration 0.1%). Multi well plates are incubated in a growth chamber at 22° C., 75% relative humidity and 110 μmol Phot*m⁻²*s⁻¹ with 14:10 h light:dark photoperiod. Growth inhibition is evaluated seven to ten days after seeding in comparison to wild type plants.

### Example 11: Herbicide Selection Using Tissue Culture

[1357] Media is selected for use and kill curves developed as specified above. For selection, different techniques are utilized. Either a step wise selection is applied, or an immediate lethal level of herbicide is applied. In either case, all of the calli are transferred for each new round of selection. Selection is 4-5 cycles of culture with 3-5 weeks for each cycle. Cali are placed onto nylon membranes to facilitate transfer (200 micron pore sheets, Biodesign, Saco, Maine). Membranes are cut to fit 100×20 mm Petri dishes and are autoclaved prior to use 25-35 calli (average weight/calli being 22 mg) are utilized in every plate. In addition, one set of calli are subjected to selection in liquid culture media with weekly subcultures followed by further selection on semi-solid media. Mutant lines are selected using the phenyluracils as disclosed SUPRA, and optionally photosynthesis inhibitor diuron as negative control. Efficiencies of obtaining mutants is high either based on a percentage of calli that gave rise to a regenerable, mutant line or the number of lines as determined by the gram of tissue utilized.

### Example 12: Soybean Transformation and PPO Inhibitor Tolerance Testing

[1358] Soybean cv Jake is transformed as previously described by Siminszky et al., Phytochem Rev. 5:445-458 (2006). After regeneration, transformants are transplanted to soil in small pots, placed in growth chambers (16 hr day/8 hr night; 25° C. day/23° C. night; 65% relative humidity; 130-150 microE m-2 s-1) and subsequently tested for the presence of the T-DNA via Taqman analysis. After a few weeks, healthy, transgenic positive, single copy events are transplanted to larger pots and allowed to grow in the growth chamber. An optimal shoot for cutting is about 3-4 inches tall, with at least two nodes present. Each cutting is taken from the original transformant (mother plant) and dipped into rooting hormone powder (indole-3-butyric acid, IBA). The cutting is then placed in oasis wedges inside a bio-dome. The mother plant is taken to maturity in the greenhouse and harvested for seed. Wild type cuttings are also taken simultaneously to serve as negative controls. The cuttings are kept in the bio-dome for 5-7 days and then transplanted to 3 inch pots and then acclimated in the growth chamber for two more days. Subsequently, the cuttings are transferred to the greenhouse, acclimated for approximately 4 days prior to spray. T0 or 2-week old T1 plants are sprayed with a treatment of the phenyluracils as disclosed SUPRA and optionally photosynthesis inhibitor diuron as negative control. Herbicide injury evaluations are taken at 2, 7, 14 and 21 days after treatment.

[1359] Transgenic T2 or T4 Soybean plants harbouring PPO inhibitor tolerance trait, were sprayed post in the greenhouse with the indicated amount of phenyluracil 1+1% (v/v) MSO. Evaluation performed 3 Days After Treatment (DAT) and 1 Week after Treatment (WAT) and shown as injury (0-9) relative to non-transgenic treated plants. Injury Scale: 0-9, 0=no injury, 9=maximum injury. Note: segregating lines.

| | | 3DAT | | | | | | |
|---|---|---|---|---|---|---|---|---|
| | | RTP10050 | RTP10050 | RTP20031 | RTP20031 | RTP20032 | RTP20032 | |
| | | RAFANZ | RAEYDZ | RBGRKB | RBGRTK | RBHSKR | RBHRVN | |
| | PTS024.1 | L397E + | L397E + | L397Q + | L397Q + | L397Q + | L397Q + | |
| | g/ha | F420V | F420V | F420M | F420M | F420M | F420M | |
| Phenyluracil | 25 | 1 | 0 | 2 | 0 | 0 | 0 | |
| No. 1 (1% | | * | * | 1 | 0 | 1 | 2 | |
| MSO) | | 0 | 0 | 1 | 0 | 0 | 1 | |
| | | * | 0 | 1 | 1 | 0 | 1 | |
| | 50 | 0 | 0 | 3 | 1 | 0 | 2 | |
| | | 1 | 1 | * | 2 | 2 | * | |
| | | 1 | 2 | 2 | 2 | 1 | 1 | |
| | | 2 | 0 | 3 | 2 | 1 | 2 | |
| | 100 | 1 | 0 | 2 | 3 | 3 | 3 | |
| | | 1 | * | 4 | 4 | 3 | 4 | |
| | | * | 1 | 4 | 4 | 3 | * | |
| | | * | * | 3 | 3 | * | 2 | |
| adujuvant only (1% | | * | * | 0 | 0 | 0 | * | |
| MSO) | | 0 | 0 | 0 | 0 | 0 | 0 | |
| | | 0 | 0 | 0 | 0 | 0 | 0 | |
| | | * | * | 0 | 0 | 0 | 0 | |
| unsprayed control | | 0 | 0 | 0 | 0 | 0 | 0 | |
| | | 0 | 0 | 0 | 0 | 0 | 0 | |
| | | 0 | * | 0 | 0 | 0 | 0 | |
| | | 0 | * | 0 | 0 | 0 | 0 | |
| | | 3DAT | | | | | | |
| | | RTP10052 | RTP10052 | RTP10052 | RTP10053 | RTP10053 | | |
| | | RAEZOR | RAEYOR | RAEYOQ | RAEWGZ | RAEWHA | Jake | CD215 |
| | PTS024.1 | L397E + | L397E + | L397E + | L397Q + | L397Q + | WT | WT |
| | g/ha | F420M | F420M | F420M | F420M | F420M | N/A | N/A |
| Phenyluracil | 25 | 0 | * | 0 | * | 1 | 9 | 9 |
| No. 1 (1% | | 0 | 0 | 0 | 1 | 1 | 9 | 9 |
| MSO) | | 0 | * | 1 | * | * | * | * |
| | | * | * | 0 | 0 | 0 | * | * |
| | 50 | 0 | 1 | 0 | 0 | 1 | 9 | 9 |
| | | 0 | * | 0 | * | 1 | 9 | 9 |
| | | * | 1 | * | 1 | 1 | * | * |
| | | * | * | 0 | * | 0 | * | * |
| | 100 | * | 1 | 2 | 1 | 2 | 9 | 9 |
| | | 0 | * | 1 | 2 | 2 | 9 | 9 |
| | | 0 | * | 1 | * | * | * | * |
| | | 0 | 0 | 1 | 2 | 1 | * | * |
| adujuvant only (1% | | * | 0 | 0 | * | * | 1 | 2 |
| MSO) | | * | * | 0 | * | 1 | 2 | 2 |
| | | 0 | * | 0 | 1 | * | * | * |
| | | 0 | 0 | 1 | * | * | * | * |
| unsprayed control | | 0 | * | 0 | * | 0 | 0 | 0 |
| | | * | 0 | 0 | * | 0 | 0 | 0 |
| | | 0 | 0 | * | 0 | 0 | * | * |
| | | 0 | * | * | 0 | * | * | * |

| | 1WAT | | | | | | |
|---|---|---|---|---|---|---|---|
| | RTP10050 | RTP10050 | RTP20031 | RTP20031 | RTP20032 | RTP20032 | |
| | RAFANZ | RAEYDZ | RBGRKB | RBGRTK | RBHSKR | RBHRVN | |
| | L397E + | L397E + | L397Q + | L397Q + | L397Q + | L397Q + | |
| PTS024.1 | F420V | F420V | F420M | F420M | F420M | F420M | |
| 25 | 0 | 0 | 1 | 0 | 0 | 0 | |
| | * | * | 1 | 0 | 1 | 1 | |
| | 0 | 0 | 1 | 1 | 1 | 1 | |
| | * | 0 | 1 | 1 | 0 | 1 | |
| 50 | 0 | 0 | 2 | 1 | 1 | 1 | |
| | 0 | 0 | * | 1 | 2 | * | |
| | 0 | 2 | 1 | 2 | 1 | 1 | |
| | 1 | 0 | 2 | 1 | 1 | 1 | |
| 100 | 0 | 0 | 2 | 3 | 3 | 2 | |
| | 0 | * | 4 | 4 | 3 | 4 | |
| | * | 1 | 4 | 4 | 3 | * | |
| | * | * | 3 | 3 | * | 1 | |
| adjuvant only | * | * | 0 | 0 | 0 | * | |
| | 0 | 0 | 0 | 0 | 0 | 0 | |
| | 0 | 0 | 0 | 0 | 0 | 0 | |
| | * | * | 0 | 0 | 0 | 0 | |
| unsprayed | 0 | 0 | 0 | 0 | 0 | 0 | |
| control | | | | | | | |
| | 0 | 0 | 0 | 0 | 0 | 0 | |
| | 0 | * | 0 | 0 | 0 | 0 | |
| | 1 WAT | | | | | | |
| | RTP10052 | RTP10052 | RTP10052 | RTP10053 | RTP10053 | | |
| | RAEZOR | RAEYOR | RAEYOQ | RAEWGZ | RAEWHA | Jake | CD215 |
| | L397E + | L397E + | L397E + | L397Q + | L397Q + | WT | WT |
| PTS024.1 | F420M | F420M | F420M | F420M | F420M | N/A | N/A |
| 25 | 0 | * | 0 | * | 1 | 9 | 9 |
| | 0 | 0 | 0 | 1 | 1 | 9 | 9 |
| | 0 | * | 0 | * | * | * | * |
| | * | * | 0 | 0 | 0 | * | * |
| 50 | 0 | 0 | 0 | 0 | 1 | 9 | 9 |
| | 0 | * | 0 | * | 0 | 9 | 9 |
| | * | 1 | * | 0 | 1 | * | * |
| | * | * | 0 | * | 0 | * | * |
| 100 | * | 1 | 1 | 1 | 1 | 9 | 9 |
| | 0 | * | 1 | 1 | 2 | 9 | 9 |
| | 0 | * | 1 | * | * | * | * |
| | 0 | 0 | 0 | 2 | 2 | * | * |
| adjuvant only | * | 0 | 0 | * | * | 1 | 2 |
| | * | * | 0 | * | 1 | 2 | 2 |
| | 0 | * | 0 | 1 | * | * | * |
| | 0 | 0 | 1 | * | * | * | * |
| unsprayed | 0 | * | 0 | * | 0 | 0 | 0 |
| control | | | | | | | |
| | * | 0 | 0 | * | 0 | 0 | 0 |
| | 0 | 0 | * | 0 | 0 | * | * |
| | 0 | * | * | 0 | * | * | * |

[1360] The following gives a definition of the injury scores measured above:
[1361] Score Description of injury
[1362] 0 No Injury
[1363] 1 Minimal injury, only a few patches of leaf injury or chlorosis.
[1364] 2 Minimal injury with slightly stronger chlorosis. Overall growth points remain undamaged.
[1365] 3 Slightly stronger injury on secondary leaf tissue, but primary leaf and growth points are still undamaged.
[1366] 4 Overall plant morphology is slightly different, some chlorosis and necrosis in secondary growth points and leaf tissue. Stems are intact. Regrowth is highly probable within 1 week.
[1367] 5 Overall plant morphology is clearly different, some chlorosis and necrosis on a few leaves and growth points, but primary growth point is intact. Stem tissue is still green. Regrowth is highly probably within 1 week.
[1368] 6 Strong injury can be seen on the new leaflet growth. Plant has a high probability to survive only through regrowth at different growth points. Most of the leaves are chlorotic/necrotic but stem tissue is still green. May have regrowth but with noticeable injured appearance.
[1369] 7 Most of the active growth points are necrotic. There may be a single growth point that could survive and may be partially chlorotic or green and partially necrotic. Two leaves may still be chlorotic with some green; the rest of the plant including stem is necrotic.
[1370] 8 Plant will likely die, and all growth points are necrotic. One leaf may still be chlorotic with some green. The remainder of the plant is necrotic.
[1371] 9 Plant is dead.

1. A method for controlling undesired vegetation at a plant cultivation site, the method comprising the steps of:
a) providing, at said plant cultivation site, a plant that comprises at least one nucleic acid comprising a nucleotide sequence encoding a protoporphyrinogen oxidase (PPO) polypeptide which is resistant or tolerant to a “PPO inhibiting herbicide”;
b) applying to said site an effective amount of said herbicide,
wherein the PPO inhibiting herbicide is a phenyluracil of formula (I) [chemical structure]
wherein
R¹ hydrogen, NH₂, C₁-C₆-alkyl or C₃-C₆-alkynyl;
R² hydrogen, C₁-C₆-alkyl or C₁-C₆-haloalkyl;
R³ hydrogen or C₁-C₆-alkyl;
R⁴ H or halogen;
R⁵ halogen, CN, C₁-C₃-haloalkyl, C₁-C₃-alkoxy, C₁-C₃-haloalkoxy, C₁-C₃-alkylthio, (C₁-C₃-alkyl)amino, di(C₁-C₃-alkyl)amino, C₁-C₃-alkoxy-C₁-C₃-alkyl, C₁-C₃-alkoxycarbonyl;
R⁶ H, halogen, C₁-C₃-alkyl, C₁-C₃-alkoxy;
R⁷ OR⁸, SR⁸, NR⁹R¹⁰, NR⁸OR⁹, NR⁸S(O)₂R⁹ or NR⁸S(O)₂NR⁹R¹⁰, wherein
R⁸ is hydrogen, C₁-C₆-alkyl, C₃-C₆-alkenyl, C₃-C₆-alkynyl, C₁-C₆-haloalkyl, C₃-C₆-haloalkenyl, C₃-C₆-haloalkynyl, C₁-C₆-cyanoalkyl, C₁-C₆-alkoxy-C₁-C₆-alkyl, C₁-C₆-alkoxy-C₁-C₆-alkoxy-C₁-C₆-alkyl, di(C₁-C₆-alkoxy)C₁-C₆-alkyl, C₁-C₆-haloalkoxy-C₁-C₆-alkyl, C₃-C₆-alkenyloxy-C₁-C₆-alkyl, C₃-C₆-haloalkenyloxy-C₁-C₆-alkyl, C₃-C₆-alkenyloxy-C₁-C₆-alkoxy-C₁-C₆-alkyl, C₁-C₆-alkylthio-C₁-C₆-alkyl, C₁-C₆-alkylsulfinyl-C₁-C₆-alkyl, C₁-C₆-alkylsulfonyl-C₁-C₆-alkyl, C₁-C₆-alkylcarbonyl-C₁-C₆-alkyl, C₁-C₆-alkoxycarbonyl-C₁-C₆-alkyl, C₁-C₆-haloalkoxycarbonyl-C₁-C₆-alkyl, C₃-C₆-alkenyloxycarbonyl-C₁-C₆-alkyl, C₃-C₆-alkynyloxycarbonyl-C₁-C₆-alkyl, amino, (C₁-C₆-alkyl)amino, di(C₁-C₆-alkyl)amino, (C₁-C₆-alkylcarbonyl)amino, amino-C₁-C₆-alkyl, (C₁-C₆-alkyl)amino-C₁-C₆-alkyl, di(C₁-C₆-alkyl)amino-C₁-C₆-alkyl, aminocarbonyl-C₁-C₆-alkyl, (C₁-C₆-alkyl)aminocarbonyl-C₁-C₆-alkyl, di(C₁-C₆-alkyl)aminocarbonyl-C₁-C₆-alkyl,
—N═CR¹¹R¹², wherein R¹¹ and R¹² independently of one another are H, C₁-C₄-alkyl or phenyl;
C₃-C₆-cycloalkyl, C₃-C₆-cycloalkyl-C₁-C₆-alkyl, C₃-C₆-heterocyclyl, C₃-C₆-heterocyclyl-C₁-C₆-alkyl, phenyl, phenyl-C₁-C₄-alkyl or a 5- or 6 membered heteroaryl,
wherein each cycloalkyl, heterocyclyl, phenyl or heteroaryl ring can be substituted by one to four substituents selected from R¹³ or a 3- to 7-membered carbocyclus,
which carbocyclus optionally has in addition to carbon atoms one or two ring members selected from the group consisting of
—N(R¹¹)—, —N═N—, —C(═O)—, —O— and —S—, and
which carbocyclus is optionally substituted with one to four substituents selected from R¹³;
wherein R³ is halogen, NO₂, CN, C₁-C₄-alkyl, C₁-C₄-haloalkyl, C₁-C₄-alkoxy or C₁-C₄-alkoxycarbonyl;
R⁹, R¹⁰ independently of one another are R⁸, or together form a 3- to 7-membered carbocyclus,
which carbocyclus optionally has in addition to carbon atoms one or two ring members selected from the group consisting of —N(R¹¹)—, —N═N—, —C(═O)—, —O— and —S—, and
which carbocyclus is optionally substituted with one to four substituents selected from R¹³;
n 1 to 3;
Q CH₂, O, S, SO, SO₂, NH or (C₁-C₃-alkyl)N;
W O or S;
X NH, NCH₃, O or S;
Y O or S;
Z phenyl, pyridyl, pyridazinyl, pyrimidinyl or pyrazinyl,
each of which is optionally substituted by 1 to 4 substituents selected from the group consisting of halogen, CN, C₁-C₆-alkyl, C₁-C₆-haloalkyl, C₁-C₆-alkoxy, C₁-C₆-haloalkoxy;
including their agriculturally acceptable salts, amides, esters or thioesters, provided the phenyluracils of formula (I) have a carboxyl group
and wherein the effective amount of said herbicide does not kill or inhibit the growth of the herbicide-tolerant plant of a).

2. The method according to claim 1, wherein the herbicide resistant or tolerant PPO polypeptide comprises one or more of the following motifs 1, 2, and/or 3:
a. Motif 1: SQ[N/K/H]KRYI, wherein the Arg at position 5 within said motif is substituted by any other amino acid;
b. Motif 2: TLGTLFSS, wherein the Leu at position 2, and/or the Gly at position 3, and/or the Leu at position 5 within said motif is substituted by any other amino acid; and
c. Motif 3: [F/Y]TTF[V/I]GG, wherein the Phe at position 4 within said motif is substituted by any other amino acid.

3. The method according to claim 1, wherein the herbicide resistant or tolerant PPO polypeptide comprises a variant of the amino acid sequence of SEQ ID NO: 1, 2, 3, 4, 5, 6, 7, 8, 9, 10, 11, 12, 13, 14, 15, 16, 17, 18, 19, 20, 21, 22, 23, 24, 25, 26, 27, 28, 29, 30, 31, 32, 33, 34, 35, 36, 37, 38, 39, 40, 41, 42, 43, 44, 45, 46, 47, 48, 49, 50, 51, 52, 53, 54, 55, 56, 57, 58, 59, 60, 61, 62, 63, 64, 65, 66, 67, 68, 69, 70, 71, 72, 73, 74, 75, 76, 77, 78, 79, 80, 81, 82, 83, 84, 85, 86, 87, 88, 89, 90, 91, 92, 93, 94, 95, 96, 97, 98, 99, 100, 101, 102, 103, 104, 105, 106, 107, 108, 109, 110, 111, 112, 113, 114, 115, 116, 117, 577, 579, 581, 583, 585, 587, 589, 591, 593, 595, 597, 599, 601, 603, 605, 607, 609, 611, 613, 615, 617, 619, 621, 623, 625, 627, or 637, which variant comprises one or more of the following substitutions:
a. the amino acid corresponding to Arg128 of SEQ ID NO: 1 is substituted by any other amino acid;
b. the amino acid corresponding to Gly211 of SEQ ID NO: 1 is substituted by any other amino acid;
c. the amino acid corresponding to Leu397 of SEQ ID NO: 1 is substituted by any other amino acid;
d. the amino acid corresponding to Gly398 of SEQ ID NO: 1 is substituted by any other amino acid;
e. the amino acid corresponding to Leu400 of SEQ ID NO: 1 is substituted by any other amino acid; and/or
f. the amino acid corresponding to Phe420 of SEQ ID NO: 1 is substituted by by any other amino acid.

4. The method according to claim 1, wherein the herbicide resistant or tolerant PPO polypeptide comprises the amino acid sequence of SEQ ID NO: 265, 266, 267, 268, 269, 270, 271, 272, 273, 274, 275, 276, 277, 278, 279, 280, 281, 282, 283, 284, 285, 286, 287, 288, 289, 290, 291, 292, 293, 294, 295, 296, 297, 298, 299, 300, 301, 302, 303, 304, 305, 306, 307, 308, 309, 310, 311, 312, 313, 314, 315, 316, 317, 318, 319, 320, 321, 322, 323, 324, 325, 326, 327328, 329, 330, 331, 332, 333, 334, 335, 336, 337, 338, 339, 340, 341, 342, 343, 344, 345, 346, 347, 348, 349, 350, 351, 352, 353, 354, 355, 356, 357, 358, 359, 360, 361, 362, 363, 364, 365, 366, 367, 368, 369, 370, 371, 372, 373, 374, 375, 376, 377, 378, 379, 380, 381, 382, 383, 384, 385, 386, 387, 388, 389, 390, 391, 392, 393, 394, 395, 396, 397, 398, 399, 400, 401, 402, 403, 404, 405, 406, 407, 408, 409, 410, 411, 412, 413, 414, 415, 416, 417, 418, 419, 420, 421, 422, 423, 424, 425, 426, 427, 428, 429, 430, 431, 432, 433, 434, 435, 436, 437, 438, 439, 440, 441, 442, 443, 444, 445, 446, 447, 448, 449, 450, 451, 452, 453, 454, 455, 456, 457, 458, 459, 460, 461, 462, 463, 464, 465, 466, 467, 468, 469, 470, 471, 472, 473, 474, 475, 476, 477, 478, 479, 480, 481, 482, 483, 484, 485, 486, 487, 488, 489, 490, 491, 492, 493, 494, 495, 496, 497, 498, 499, 500, 501, 502, 503, 504, 505, 506, 507, 508, 509, 510, 511, 512, 513, 514, 515, 516, 517, 518, 519, 520, 521, 522, 523, 524, 525, 526, 527, 528, 529, 530, 531, 532, 533, 534, 535, 536, 537, 538, 539, 540, 541, 542, 543, 544, 545, 546, 547, 548, 549, 550, 551, 552, 553, 554, 555, 556, 557, 558, 559, 560, 561, 562, 563, 564, 565, 651; 652; 653; 654; 655; 656; 657; 658; 659; 660; 661; 662; 663; 664; 665; 666; 667; 668; 669; 670; 671, 714; 715; 716; 717; 718; 719; 720; 721; 722; 723; 724; 725; 726; 727; 728; 729; 730; 731; 732; 733; 734; 735; 736; 737; 738, 795, 882, 883, 884, 885, 886, 887, 888, 889, 890, 891, 892, 893, 894, 895, 896, 897, 898, 899, 900, 901, 902, 903, 904, 905, 906, 907, 908, 909, 910, 911, 912, 913, 914, 915, 916, 917, 918, 919, 920, 921, 922, 923, 924, 925, 926, 927, 928, 929, 930, 931, 932, 933, 934, 935, 936, 937, 938, 939, 940, 941, 942, 943, 944, 945, 946, 947, 948, 949, 950, 951, 952, 953, 954, 955, 956, 957, 958, 959, 960, or a variant thereof.

5. The method according to claim 1, wherein the herbicide resistant or tolerant PPO polypeptide comprises the amino acid sequence of SEQ ID NO: 240, 241, 242, 243, 244, 245, 246, 247, 248, 249, 250, 251, 252, 253, 254, 255, 256, 257, 258, 259, 260, 261, or 263.

6. The method according to claim 1, wherein the plant comprises at least one additional heterologous nucleic acid comprising a nucleotide sequence encoding a herbicide tolerance enzyme.

7. The method according to claim 1, wherein the phenyluracil of formula (I) is applied in conjunction with one or more additional herbicides.

The application's sequence listing, which the Patent Office published only in electronic form, follows.

SEQUENCE LISTING (1183 sequences)

SEQ ID NO: 1 - protein, 534 aa, Amaranthus sp.
MVIQSITHLSPNLALPSPLSVSTKNYPVAVMGNISEREEPTSAKRVAVVGAGVSGLAAAYKLKSHGLSVTLFEADSRAGGKLKTVKKDGFIWDEGANTMTESEAEVSSLIDDLGLREKQQLPISQNKRYIARDGLPVLLPSNPAALLTSNILSAKSKLQIMLEPFLWRKHNATELSDEHVQESVGEFFERHFGKEFVDYVIDPFVAGTCGGDPQSLSMHHTFPEVWNIEKRFGSVFAGLIQSTLLSKKEKGGENASIKKPRVRGSFSFQGGMQTLVDTMCKQLGEDELKLQCEVLSLSYNQKGIPSLGNWSVSSMSNNTSEDQSYDAVVVTAPIRNVKEMKIMKFGNPFSLDFIPEVTYVPLSVMITAFKKDKVKRPLEGFGVLIPSKEQHNGLKTLGTLFSSMMFPDRAPSDMCLFTTFVGGSRNRKLANASTDELKQIVSSDLQQLLGTEDEPSFVNHLFWSNAFPLYGHNYDSVLRAIDKMEKDLPGFFYAGNHKGGLSVGKAMASGCKAAELVISYLDSHIYVKMDEKTA

SEQ ID NO: 2 - protein, 534 aa, Amaranthus sp.
MVIQSITHLSPNLALPSPLSVSTKNYPVAVMGNISEREEPTSAKRVAVVGAGVSGLAAAYKLKSHGLSVTLFEADSRAGGKLKTVKKDGFIWDEGANTMTESEAEVSSLIDDLGLREKQQLPISQNKRYIARAGLPVLLPSNPAALLTSNILSAKSKLQIMLEPFLWRKHNATELSDEHVQESVGEFFERHFGKEFVDYVIDPFVAGTCGGDPQSLSMHHTFPEVWNIEKRFGSVFAGLIQSTLLSKKEKGGENASIKKPRVRGSFSFQGGMQTLVDTMCKQLGEDELKLQCEVLSLSYNQKGIPSLGNWSVSSMSNNTSEDQSYDAVVVTAPIRNVKEMKIMKFGNPFSLDFIPEVTYVPLSVMITAFKKDKVKRPLEGFGVLIPSKEQHNGLKTLGTLFSSMMFPDRAPSDMCLFTTFVGGSRNRKLANASTDELKQIVSSDLQQLLGTEDEPSFVNHLFWSNAFPLYGHNYDSVLRAIDKMEKDLPGFFYAGNHKGGLSVGKAMASGCKAAELVISYLDSHIYVKMDEKTA

SEQ ID NO: 3 - protein, 533 aa, Amaranthus sp.
MVIQSITHLSPNLALPSPLSVSTKNYPVAVMGNISEREEPTSAKRVAVVGAGVSGLAAAYKLKSHGLSVTLFEADSRAGGKLKTVKKDGFIWDEGANTMTESEAEVSSLIDDLGLREKQQLPISQNKRYIARDGLPVLLPSNPAALLTSNILSAKSKLQIMLEPFLWRKHNATELSDEHVQESVGEFFERHFGKEFVDYVIDPFVAGTCGDPQSLSMHHTFPEVWNIEKRFGSVFAGLIQSTLLSKKEKGGENASIKKPRVRGSFSFQGGMQTLVDTMCKQLGEDELKLQCEVLSLSYNQKGIPSLGNWSVSSMSNNTSEDQSYDAVVVTAPIRNVKEMKIMKFGNPFSLDFIPEVTYVPLSVMITAFKKDKVKRPLEGFGVLIPSKEQHNGLKTLGTLFSSMMFPDRAPSDMCLFTTFVGGSRNRKLANASTDELKQIVSSDLQQLLGTEDEPSFVNHLFWSNAFPLYGHNYDCVLRAIDKMEKDLPGFFYAGNHKGGLSVGKAMASGCKAAELVISYLDSHIYVKMDEKTA

SEQ ID NO: 4 - protein, 533 aa, Amaranthus sp.
MVIQSITHLSPNLALPSPLSVSTKNYPVAVMGNISEREEPTSAKRVAVVGAGVSGLAAAYKLKSHGLSVTLFEANSRAGGKLKTVKKDGFIWDEGANTMTESEAEVSSLIDDLGLREKQQLPISQNKRYIARDGLPVLLPSNPAALLTSNILSAKSKLQIMLEPFLWRKHNATELSDEHVQESVGEFFERHFGKEFVDYVIDPFVAGTCGDPQSLSMYHTFPEVWNIEKRFGSVFAGLIQSTLLSKKEKGGENASIKKPRVRGSFSFQGGMQTLVDTMCKQLGEDELKLQCEVLSLSYNQKGIPSLGNWSVSSMSNNTSEDQSYDAVVVTAPIRNVKEMKIMKFGNPFSLDFIPEVTYVPLSVMITAFKKDKVKRPLEGFGVLIPSKEQHNGLKTLGTLFSSMMFPDRAPSDMCLFTTFVGGSRNRKLANASTDELKQIVSSDLQQLLGTEDEPSFVNHLFWSNAFPLYGHNYDSVLRAIDKMEKDLPGFFYAGNHKGGLSVGKAMASGCKAAELVISYLDSHIYVKMDEKTA

SEQ ID NO: 5 - protein, 535 aa, Amaranthus sp.
MVIQSITHLSPKLALPSPLSVSTKNYPVAVMGNISEREEPTSAKRVAVVGAGVSGLAAAYKLKSHGLNVTLFEADSRAGGKLKTVKKDGFIWDEGANTMTESEAEVSSLIDDLGLREKQQLPISQNKRYIARDGLPVLLPSNPAALLSSNILSAKSKLQIMLEPFLWRKRNATELSDEHVQESVGEFFERHFGKEFVDYVIDPFVAGTCGGDPQSLSVHHTFPDVWNVEKRFGSVFAGLIQSTLLSKKEKGGGENASIKKPRVRGSFSFHGGMQTLVDTMCKQIGEDELKLQCEVLSLSYNQKGIPSLGNWSVSSMSNNTSEDQSYDAVVVTAPIRNVKEMKIMKFGNPFSLDFIPEVTYVPLSVMITAFKKDKVKRPLEGFGVLIPSKEQHNGLKTLGTLFSSMMFPDRAPSDMCLFTTFVGGSRNRKLAKASTDELKQIVSSDLQQLLGTEDEPSFVNHLFWSNAFPLYGHNYDSVLRAIDKMEKDLPGFFYAGNHKGGLSVGKAMASGCKAAELVISYLDSHLYVKMNEKTA

SEQ ID NO: 6 - protein, 505 aa, Amaranthus sp.
MGNISERDEPTSAKRVAVVGAGVSGLAAAYKLKSHGLNVTLFEADSRAGGKLKTVKKDGFIWDEGANTMTESEAEVSSLIDDLGLREKQQLPISQNKRYIARDGLPVLLPSNPAALLTSNILSAKSKLQIMLEPFFWRKHNATELSDEHVQESVGEFFERHFGKEFVDYVIDPFVAGTCGGDPQSLSMHHTFPEVWNIEKRFGSVFAGLIQSTLLSKKEKGGGGNASIKKPRVRGSFSFHGGMQTLVDTICKQLGEDELKLQCEVLSLSYNQKGIPSLGNWSVSSMSNNTSEDQSYDAVVVTAPIRNVKEMKIMKFGNPFSLDFIPEVSYVPLSVMITAFKKDKVKRPLEGFGVLIPSKEQHNGLKTLGTLFSSMMFPDRAPSDMCLFTTFVGGSRNRKLANASTDELKQIVSSDLQQLLGTEDEPSFVNHLFWSNAFPLYGHNYDSVLRAIDKMEKDLPGFFYAGNHKGGLSVGKAMASGCKAAELVISYLDSHIYVKMDEKTA

SEQ ID NO: 7 - protein, 531 aa, Spinacia sp.
MVILPVSQLSTNLGLSLVSPTKNNPVMGNVSERNQVNQPISAKRVAVVGAGVSGLAAAYKLKSNGLNVTLFEADSRAGGKLKTVVKDGLIWDEGANTMTESDEEVTSLFDDLGIREKLQLPISQNKRYIARDGLPVLLPSNPVALLKSNILSAKSKLQIMLEPFLWKKHNGAKVSDENAQESVAEFFERHFGKEFVDYLIDPFVAGTSGGDPQSLSMRHAFPELWNIENRFGSVISGFIQSKLSSKKEKGGEKQSSNKKPRVRGSFSFQGGMQTLVDTICKEFGEDELKLQSEVLSLSYSHNGSLTSENWSVSSMSNSTIQDQPYDAVVVTAPINNVKELKIMKVENPFSLDFIPEVSCLPLSVIITTFKKTNVKRPLEGFGVLVPSNEQHNGLKTLGTLFSSMMFPDRAPSDVYLYTTFVGGSRNRELAKASTDELKQIVSSDLQQLLGTEGEPTFVNHFYWSKAFPLYGRNYDSVLRAIEKMERDLPGLFYAGNHKGGLSVGKSIASGYKAAELAISYLESNKMTEETI

SEQ ID NO: 8 - protein, 508 aa, Vicia sp.
MAEKSDAQSHYNGSGKRVAVVGAGVSGLAAAYKLKLHGVNITLYEAEERAGGKLRSVSQHGLVWDEGANTMTESEIEVGSLLDNLRLREKQQFPISQNKRYIVRNGMPVLLPSNPIALIKSNILSAKSKFQIILEPFLWKKSDLSKVSDDHMKESVGGFFQRHFGKEVVDYLIDPFVAGTSGGDPESLSMHHTFPELWNLEKRFGSIIAGAVLSKLSAKREKRGETKGSSEKKKRQRGSFSFQGGMQTLTDTLCKELGKDKLRLKSKVLSLSYSHGEKSALENWSVAYASNPGKQSKDLSFDAVIMTAPLCNVREMKIMKKGNPFLLDFLPEVSYLPLSVIITTFKKENVKRPLEGFGVLVPSKEQQNGLKTLGTLFSSMMFPDRAPNDLYLYTTFIGGSRNRELAKASTDELKQIVTSDLRQLLGAEGEPTFVNHFYWSKAFPLFGHNYDSVLEAIDKMEKDLPGFFYAGNHKGGLSVGKAIASGCKAADLVISYLNSSSDGKMFKE

SEQ ID NO: 9 - protein, 511 aa, Ricinus sp.
  source 1..511: note = Ricinus (angiosperm)
MSSVIKEDRNPSHVKRVAVVGAGVSGLAAAYKLKSHGLKVTVFEAEERAGGKLRSVNHDGLIWDEGANTMTESEMEVKSLIGNLGIREKQQFPISQNKRYIVRNGKPILIPTNPIALITSNILSAQSKFQIILEPFLWKKRESSETHNAYTEESVGEFFQRHFGKEVVDYLIDPFVAGTSAGDPESLSVCHSFPELWNLEKRFGSIIAGVVQAKLSTKRGKSQETKGSSVKKKQQRGSFSFFGGMQTLTDTLCKALAKDELRLESKVFSLSYNPDSKSAVENWSLSYAFKGAKHLQNSSYDAIVMTAPLCNVKEMKITKNRNIFSLNFLPEVSYMPLSVVITTFKKDNVKSPLEGFGVLVPSKEQQNGLKTLGTLFSSMMFPDRAPNDLYLYTTFVGGSRNKELAKASTDDLKQIVTSDLRQLLGAEGEPTFVNHFYWSKAFPLYGRNYDAVLEAIDTMEKDLPGFFYAGNHKGGLSVGKAIASGCKAADLVISYLESSSDDKMLKEGPSN

SEQ ID NO: 10 - protein, 504 aa, Theobroma sp.
MAAAKNKDKQTSAKRVAVVGAGVSGLAAAYKLKSHGLNVTMFEAEGRAGGKLRSVSQEGLIWDEGANTMTESEIEVRSLFDDLGIRDKQQVPIAQKKRYIVRNGVPVLIPSNPIALITSNILSAKSKFQIILEPFLWKKSDASKVSDAYNLESVGGFFQRHFGQEVVDYLIDPFVAGTSAGDPESLSMRHSFPELWDLEKRFGSIIVGAVKSKLSAKRENRGERKTSEKRKPLPGPFSFQGGMQTLTDMLCKDLSKDELKLKSKVLSLSYSHDGKSTLENWSLSYASDRDKRSQGSSFDAVVMTAPLCNVKEMKIMKGGKLFPLNFIPQVSYMPLSVIITTFKKENVKKPLEGFGVLVPSKEQQNGLKTLGTLFSSIMFPDRAPNNLYLYTTFVGGSRNKELAKASTDELKHIVTSDLRQLLGVEGEPTFLNHFYWSKAFPLYGRNYASVLKAIEKMETDLPGFFYAGNHKGGLSVGKAIASGCKAADLVISYLESSHQKLLKD

SEQ ID NO: 11 - protein, 502 aa, Glycine sp.
MASSATDDNPRSVKRVAVVGAGVSGLAAAYKLKSHGLDVTVFEAEGRAGGRLRSVSQDGLIWDEGANTMTESEIEVKGLIDALGLQEKQQFPISQHKRYIVKNGAPLLVPTNPAALLKSKLLSAQSKIHLIFEPFMWKRSDPSNVCDENSVESVGRFFERHFGKEVVDYLIDPFVGGTSAADPESLSMRHSFPELWNLEKRFGSIIAGALQSKLFAKREKTGENRTALRKNKHKRGSFSFQGGMQTLTDTLCKELGKDDLKLNEKVLTLAYGHDGSSSSQNWSITSASNQSTQDVDAVIMTAPLYNVKDIKITKRGTPFPLNFLPEVSYVPISVMITTFKKENVKRPLEGFGVLVPSKEQKNGLKTLGTLFSSMMFPDRAPSDLYLYTTFIGGTQNRELAQASTDELRKIVTSDLRKLLGAEGEPTFVNHFYWSKGFPLYGRNYGSVLQAIDKIEKDLPGFFFAGNYKGGLSVGKAIASGCKAADLVISYLNSASDNTVPDK

SEQ ID NO: 12 - protein, 502 aa, Prunus sp.
MTSLTTKEGSVKRVAVVGAGVSGLAAAYKLKSHGFDVTVFEAEGRAGGKLRSVSHDGLIWDEGANTMTESEKEVQTLLDDLGIREKQQFPISQNKRYIVRNGSPVLIPTNPIALIKSNFLSAQSKLQIILEPYLWKDKRVSDDHTEESVGGFFQRHFGEEVVDYLIDPFVAGTSAGDPESLSMRHSFPDIWNIEKRFGSVISGAIKSKLSASKGKSGETKGSVEKGKRQRGSFSFHGGMQTLTDILCNQLEKDELKLNSKVLSLSYRQGGNSASENWSVSRVADDDKHSQSLSVDALIMTAPLCNVKEMKITKRGTRFPLDFIPEVVYMPLSVIITTFKKENVKRPLEGFGVLVPSKEQKNGLKTLGTLFSSMMFPDRAPSDLYLYTTFVGGSRNKELAKASTDELKQIVTSDIRHLLGAEGEPTFVNHFYWSNAFPLYGRDYDSVIEAIENMEKNLPGFFYAGNHRGGLSVGKSIASGCKAAELVISYLESPSDEKTRHKG

SEQ ID NO: 13 - protein, 499 aa, Medicago sp.
MASSAKDDNPRSVKRVAVVGAGVSGLAAAYKLKSHGLDVTVFEAEGRAGGRLRTVSRDGLVWDEGANTMTENEIEVKGLIDALGLHEKQQYPLSQHKRYIVKNGTPVLVPANPAALLKSKLLSAQSKIQVIFEPFMWKRSDSSAVRDENSEESVSRFFERHFGKEVVDYLIDPFVGGTSAAGPESLSIRHSFPELWNLEKRFGSIIAGALQSSVFGKKDKAGETKDVPRKNKHQRGSFSFQGGMQTLTDTLCKELGKDDIKLNAKVLTLAYSHDGSSPSQNWSITCTSNRKAQDVDAVIMTAPLGNVRDIQIKKKGNPFPLNFLPEVTYLPLSVLITTFKKENVKRPLEGFGVLVPSKEQQNGFKTLGTLFSSMMFPDRAPSDMHLYTTFIGGTRNRELAQASTDELTKIVTSDLRKLLGAEGEPAFVNHFFWSKGFPLYGHNYGSVLEAIDKMEKDLPGFFYAGNHRGGLSVGRAIASGCKAADLVISYLNNASDNSV

SEQ ID NO: 14 - protein, 506 aa, Fragaria sp.
MASPSQPHNHRSVKKVAVVGAGVSGLAAAYKLKSHGFDVTVLEAEGRAGGKLRSVSYNGLIWDEGANTMTEAETEVQTLLDSLGLRDKQQFPISQNKRYVARNGMPVLLPTNPIELIKSNFLSTKSKFQILLEPYLWKKKKVSDDHTQESVAGFFQRHFGKEVVDYLIDPFVAGTSAGDPESLSMPHSFPELWNIEKRYGSVITGTIRSKVSSRKEKRGDTKGSVEKGKRQRGSFSFQGGMQTLTDTLCKQLGKHELKLNSKVLSLSYSHDGSSTSENWSLSCVANDDKHSQSSSVDAIIMTAPLCSIKEMKITRRGTIFPLDFLPEVNYMPLSVLITSFKKENIKRPLEGFGVLVPSKEQENGLKTLGTLFSSMMFPDRAPSDQYLYTTFVGGSRNKELAKASKDELKQIVTSDIRQLLGAEGEPTFVNHYYWSKAFPLYGHNYDSVIEAIEKMEKNLPGLFYAGNHRGGLSVGKAIASGCKAADLVISYLESSSDGKILQQGSS

SEQ ID NO: 15 - protein, 509 aa, Citrus sp.
MASAPGEDNQRSAKRVAVVGAGVSGLAAAYKLKSNGVNVMVFEADERAGGKLRSISKDGLIWDEGANTMTESEMEVKGLLDDLGIREKQQFPISQYKRYVVRNGVPFLIPTNPIALITSNFLSAQSKFQIILEPFLWKKSDSAKVSAEDAKESVGGFFQRHFGREVVDFLIDPFVAGTSAADPESLVMRHSFPELWNLEKRYGSVIAGAIKSKFSARKEKSAEAKGSSEKKHRQRGSFSFLGGMQTLTDALCKALGKDEVCLKSKVLSLSYSHDGKSALENWSLSSSNQDKQSQGLSFDAVIMTASLCNVKEMKITKGGNLFPLDFLPEVIYMPLSVFITAFKKENVGKPLQGFGVLVPSKEQQNGLKTLGTLFSSMMFPDRAPKDLFLYTTFVGGSRNKELAKASTDELKQIVTSDLRQLLGVEGEPTFVNHFFWSKAFPLYGRDYDSVLEAIEKMEKNLPGFFYAGNHKGGLSVGKSIASGCKAAELVISYLENSSDDKMLKEGSSK

SEQ ID NO: 16 - protein, 509 aa, Citrus sp.
MTNKWRVDFSGSAKRVAVVGAGVSGLAAAYKLKSNGVNVMVFEADERAGGKLRSISKDGLIWDEGANTMTESEMEVKGLLDDLGIREKQQFPISQYKRYVVRNGVPFLIPTNPIALITSNFLSAQSKFQIILEPFLWKKSDSAKVSAEDAKESVGGFFQRHFGREVVDFLIDPFVAGTSAADPESLVMRHSFPELWNLEKRYGSVIAGAIKSKFSARKEKSAEAKGSSEKKHRQRGSFSFLGGMQTLTDALCKALGKDEVCLKSKVLSLSYSHDGKSALENWSLSSSNQDKQSQGLSFDAVIMTASLCNVKEMKITKGGNLFPLDFLPEVIYMPLSVFITAFKKENVGKPLQGFGVLVPSKEQQNGLKTLGTLFSSMMFPDRAPKDLFLYTTFVGGSRNKELAKASTDELKQIVTSDLRQLLGVEGEPTFVNHFFWSKAFPLYGRDYDSVLEAIEKMEKNLPGFFYAGNHKGGLSVGKSIASGCKAAELVISYLENSSDDKMLKEGSSK

SEQ ID NO: 17 - protein, 502 aa, Cicer sp.
MASSAKDNNSRSVKRVAVVGAGVSGLAAAYKLKSHGLDVTVFEAEGRAGGRLRTVSRDGLVWDEGANTMTENEAEVKSLIDALGLQEKQQYPLSQHKRYIVKNGMPLLVPANPAALLKSKLLSAQSKIRVIFEPFMWKRSDSSTVCDENSEESVSRFFERHFGKEVVDYLIDPFVGGTSAADPESLSMRHSFPELWNLEKRFGSIIGGALQSNLFGKRDKTGETKDAPRKSKHQRGSFSFQGGMQTLTDTLCKELGKDNLKLNAKVLTLAYSHNGSSPSENWSITCASNLTTQDVDAVIMTAPLGNVKDIQITKRGTPFTLNFFPEVTYLPLSVLITTFKKENVKRPLEGFGVLVPSKEEQNGFKTLGTLFSSMMFPDRAPSDLHLYTTFIGGTRNRELAQASTDELKKIVTSDLRKLLGAEGEPTFVNHFYWSKGFPLYGHNYGLVLEAIDKMEKGLPGFFYAGNHRGGLSVGRAIASGCKAADLVISYLNNASDNTVADK

SEQ ID NO: 18 - protein, 502 aa, Cucumis sp.
MASPAKQDRRTSRKKVAVVGAGVSGLAAAYKLKSHGFDVTVLEADERVGGKLRSVSYKGLIWDEGANTMTESEPEVQCLLDDLGLREKQQFPISQNKRYIVRNGVPVLVPTNPIALIKSNFLSAKSKFQIILEPFLWKKYDSSKVSDDGTDESVGGFFQRHFGQEVVDYLIDPIVAGTSAGDPDSLSMSHSFPELWNIEKRFGSIFAGLVLSKLSTKKESGGVRNGTTGKSKPRRGSFSFQNGMQTLTDTLSKELGEGVLKLRSEVLSLSYNAGKYASQNWSLIYSKDKNSKDLIADAVIMTAPVCSVREMKFMKGGIPFSLNFLPEVAYMPLSVMITTFRKESVKRPLEGFGVLVPSSEQQNGLRTLGTLFSSMMFPNRASNDEYLYTTFIGGSRNRELAKSSTDELKQIVTTDLRQLLGVEGEPTFINHFYWSKAFPLYGRNYDSVVKAIETMEKNLPGFFYAGNHRDGLSVGKSIASGCKAADLVISYLESSTDQSCAE

SEQ ID NO: 19 - protein, 497 aa, Cucumis sp.
MKSSQSSRKKVAVVGAGVSGLAAAYKLKSHGFDVTVLEADERVGGKLRSVSYKGLIWDEGANTMTESEPEVQCLLDDLGLREKQQFPISQNKRYIVRNGVPVLVPTNPIALIKSNFLSAKSKFQIILEPFLWKKYDSSKVSDDGTDESVGGFFQRHFGQEVVDYLIDPIVAGTSAGDPDSLSMSHSFPELWNIEKRFGSIFAGLVLSKLSTKKESGGVRNGTTGKSKPRRGSFSFQNGMQTLTDTLSKELGEGVLKLRSEVLSLSYNAGKYASQNWSLIYSKDKNSKDLIADAVIMTAPVCSVREMKFMKGGIPFSLNFLPEVAYMPLSVMITTFRKESVKRPLEGFGVLVPSSEQQNGLRTLGTLFSSMMFPNRASNDEYLYTTFIGGSRNRELAKSSTDELKQIVTTDLRQLLGVEGEPTFINHFYWSKAFPLYGRNYDSVVKAIETMEKNLPGFFYAGNHRDGLSVGKSIASGCKAADLVISYLESSTDQSCAE

SEQ ID NO: 20 - protein, 504 aa, Nicotiana sp.
MAPSAGEDKHSSAKRVAVIGAGVSGLAAAYKLKIHGLNVTVFEAEGKAGGKLRSVSQDGLIWDEGANTMTESEGDVTFLIDSLGLREKQQFPLSQNKRYIARNGTPVLLPSNPIDLIKSNFLSTGSKLQMLLEPILWKNKKLSQVSDSHESVSGFFQRHFGKEVVDYLIDPFVAGTCGGDPDSLSMHHSFPELWNLEKRFGSVILGAIRSKLSPKNEKKQGPPKTSANKKRQRGSFSFLGGMQTLTDAICKDLREDELRLNSRVLELSCSCTEDSAIDSWSIISASPHKRQSEEESFDAVIMTAPLCDVKSMKIAKRGNPFLLNFIPEVDYVPLSVVITTFKRENVKYPLEGFGVLVPSKEQQHGLKTLGTLFSSMMFPDRAPNNVYLYTTFVGGSRNRELAKASRTELKEIVTSDLKQLLGAEGEPTYVNHLYWSKAFPLYGHNYDSVLDAIDKMEKNLPGLFYAGNHRGGLSVGKALSSGCNAADLVISYLESVSTDSKRHC

SEQ ID NO: 21 - protein, 501 aa, Solanum sp.
MAPSAGEDKQKRVAVIGAGVSGLAAAYKLKVHGLNVTVFEAEGRAGGKLRSLSQDGLIWDEGANTMTESEGDVTFLLDSLGLREKQQFPLSQNKRYIARNGTPTLIPSNPFDLFKSNFLSTGSKLQMLFEPLLWKNKKLTKVSDKHESVSGFFQRHFGKEVVDYLIDPFVAGTCGGDPDSLSMHLSFPDLWNLEKRFGSVIVGAIQSKLSPIKEKKQGPPRTSINKKRQRGSFSFLGGMQTLTDAICKNLKEDELRLNSRVLELSCSCSGDSAIDSWSIFSASPHKRQAEEESFDAVIMTAPLCDVKSMKIAKRGNPFLLNFIPEVDYVPLSVVITTFKKESVKHPLEGFGVLVPSQEQKHGLKTLGTLFSSMMFPDRAPNNVYLYTTFVGGSRNRELAKASRTELKEIVTSDLKQLLGAEGEPTYVNHLCWSKAFPLYGHNYDSVLDAIDKMEKSLPGLFYAGNHKGGLSVGKALSSGCNAADLVISYLEAVSADTKNHS

SEQ ID NO: 22 - protein, 508 aa, Arabidopsis sp.
MASGAVADHQIEAVSGKRVAVVGAGVSGLAAAYKLKSRGLNVTVFEADGRVGGKLRSVMQNGLIWDEGANTMTEAEPEVGSLLDDLGLREKQQFPISQKKRYIVRNGVPVMLPTNPIELVTSSVLSTQSKFQILLEPFLWKKKSSKVSDASAEESVSEFFQRHFGQEVVDYLIDPFVGGTSAADPDSLSMKHSFPDLWNVEKSFGSIIVGAIRTKFAAKGGKSRDTKSSPGTKKGSRGSFSFKGGMQILPDTLCKSLSHDEINLDSKVLSLSYNSGSRQENWSLSCVSHNETQRQNPHYDAVIMTAPLCNVKEMKVMKGGQPFQLNFLPEINYMPLSVLITTFTKEKVKRPLEGFGVLIPSKEQKHGFKTLGTLFSSMMFPDRSPSDVHLYTTFIGGSRNQELAKASTDELKQVVTSDLQRLLGVEGEPVSVNHYYWRKAFPLYDSSYDSVMEAIDKMENDLPGFFYAGNHRGGLSVGKSIASGCKAADLVISYLESCSNDKKPNDSL

SEQ ID NO: 23 - protein, 512 aa, Arabidopsis sp.
MESGAVGDHDTKFESISGKRVAVVGAGVSGLAAAYKLKSRGLNVTVFEADERAGGKLTSVMQNGLIWDQGANTMTEAEPEVGSLLDDLGLRDKQQFPISQKKRYIVRNGLPMMLPTNPIELVTSSVLSTQAKIQILLEPFLWKKNDSSSKVSDASAEESVSGFFQRHFGQEVVDYLIDPFVGGTSAADPDSLSMKHSFPDLWNVEKSFGSIIVGAIRTKLAAKGGKSGEAKSSPGTKRGSRRSFSFKGGMQILPDMLCKSLSHDEINLDSKVLSLSYNSGSRQENWSLSCVSHNETQRQNLHYDAVVMTAPLCNVKEMKVTKGGQPFLLNFLPEINYMPLSVLITTFTKEKVKRPLEGFGVLIPSKEKKHGFKTLGTLFSSMMFPDRCPSDLHLYTTFIGGSRNQELAKASTDELKQVVTSDLQRLLGVEGEPVSVNHYYWRKAFPLYDSSYGSVMEAIDKMEKDLPGFFYAGNHRGGLSIGKSIASGCKAADLVISYLESCSNDKKPDESL

SEQ ID NO: 24 - protein, 501 aa, Arabidopsis sp.
MASGAVADHQIEAVSGKRVAVVGAGVSGLAAAYKLKSRGLNVTVFEADGRVGGKLRSVMQNGLIWDEGANTMTEAEPEVGSLLDDLGLREKQQFPISQKKRYIVRNGVPVMLPTNPIELVTSSVLSTQSKFQILLEPFLWKKKSSKVSDASAEESVSEFFQRHFGQEVVDYLIDPFVGGTSAADPDSLSMKHSFPDLWNSFGSIIVGAIRTKFAAKGGKSRDTKSSPGTKKGSRGSFSFKGGMQILPDTLCKSLSHDEINLDSKVLSLSYNSGSRQENWSLSCVSHNETQRQNPHYDAAPLCNVKEMKVMKGGQPFQLNFLPEINYMPLSVLITTFTKEKVKRPLEGFGVLIPSKEQKHGFKTLGTLFSSMMFPDRSPSDVHLYTTFIGGSRNQELAKASTDELKQVVTSDLQRLLGVEGEPVSVNHYYWRKAFPLYDSSYDSVMEAIDKMENDLPGFFYAGNHRGGLSVGKSIASGCKAADLVISYLESCSNDKKPNDSL

SEQ ID NO: 25 - protein, 547 aa, Arabidopsis sp.
MGLIKNGTLYCRFGISWNFAAVFFSTYFRHCFRLVRDFDSELLQIAMASGAVADHQIEAVSGKRVAVVGAGVSGLAAAYKLKSRGLNVTVFEADGRVGGKLRSVMQNGLIWDEGANTMTEAEPEVGSLLDDLGLREKQQFPISQKKRYIVRNGVPVMLPTNPIELVTSSVLSTQSKFQILLEPFLWKKKSSKVSDASAEESVSEFFQRHFGQEVVDYLIDPFVGGTSAADPDSLSMKHSFPDLWNSFGSIIVGAIRTKFAAKGGKSRDTKSSPGTKKGSRGSFSFKGGMQILPDTLCKSLSHDEINLDSKVLSLSYNSGSRQENWSLSCVSHNETQRQNPHYDAAPLCNVKEMKVMKGGQPFQLNFLPEINYMPLSVLITTFTKEKVKRPLEGFGVLIPSKEQKHGFKTLGTLFSSMMFPDRSPSDVHLYTTFIGGSRNQELAKASTDELKQVVTSDLQRLLGVEGEPVSVNHYYWRKAFPLYDSSYDSVMEAIDKMENDLPGFFYAGNHRGGLSVGKSIASGCKAADLVISYLESCSNDKKPNDSL

SEQ ID NO: 26 - protein, 467 aa, Ambrosia sp.
GCAAAYKLKLHGLNVTVFEADERVGGKLRSVSQDGLIWDEGANTMTESEADVSSLIDDLGLRDKQQFPISQHKRYIVRNGKPVLIPSNPIALIRSSFLSTQSKVQILLEPFLWKKTKSSDEPESVGGFFQRHFGKEVVEYLIDPVVAGTSGGDPESLSMRHAFPELWDLERRFGSIISGAFQSMVSSRGGKRKPSGNSKRRRGSFSFFGGMQTLTDALSKEIGPHEINLQSKVLEMSYSCDDNAVGNWSIYCAPDQNKQFQQSFDAVIMTAPLNNLKEMKITKTGSPFLLNFIPEVSYLPISVIISTFKKENVKQPLEGFGVLVPAKEQENGLRTLGTLFSSMMFPDRASEDVYLYTTFVGGSRNKELAKASRDELKQIVTSDLRQLLGTEGEPKFLTHYYWSKAFPLYGRDYGSVIEAIEKMEKELPGYFYAGNHKGGLSVGKAISSGCKAAESVIAYLDSYSNQK

SEQ ID NO: 27 - protein, 542 aa, Setaria sp.
  source 1..542: note = Setaria (grass)
MLSSSTTTASPASSHPYRPAYPRASLRPVLAMAGSDDPRAAPARSVAVIGAGVSGLAAAYRLRKSGVNVTVFEAADRAGGKIRTNSEAGFLWDEGANTMTEGELEVSRLIDDLGLQDRQQYPNSQHKRYIVKDGAPALIPADPISLMKSSVLSTKSKLALFLEPFLYKKSNTRNSGKVSDEHLSESVGSFFERHFGREVVDYLIDPFVAGTSAGDPESLSIRHAFPALWNLERKYHSIIVGAILSKLTAKGDPVKTGSDLSGKRRNRRASFSFHGGMQSLINALHNEVGDDNVKLGTEVLSLACTFDGLPSTGGWSISVDSKDAGSKDLAKNQTFDAVIMTAPLSNVQRMKFRKGGAPFVLDFLPKVNYLPLSLMVTAFKKEDVKKPLEGFGVLIPYKEQQKHGLKTLGTLFSSMMFPDRAPDDQYLYTTFVGGSHNRDLAGAPTSILKQLVTSDLKKLLGVEGQPTFVKHIYWRNAFPLYGRDYGSVLDAIEKMEKNLPGFFYAGNNKDGLAVGNVIASGSKAAELAISYLESQTKHNNSH

SEQ ID NO: 28 - protein, 544 aa, Sorghum sp.
  source 1..544: note = Sorghum (genus)
MLARTATVSSTSSHSHPYRPTSARSLRLRPVLAMAGSDDSRAAPARSVAVVGAGVSGLVAAYRLRKSGVNVTVFEAADRAGGKIRTNSEGGFLWDEGANTMTEGELEASRLIDDLGLQDKQQYPNSQHKRYIVKDGAPALIPSDPISLMKSSVLSTKSKIALFFEPFLYKKANTRNPGKVSDEHLSESVGSFFERHFGREVVDYLIDPFVAGTSAGDPESLSICHAFPALWNLERKYGSVVVGAILSKLTAKGDPVKTRRDSSAKRRNRRVSFSFHGGMQSLINALHNEVGDDNVKLGTEVLSLACTLDGAPAPGGWSISDDSKDASGKDLAKNQTFDAVIMTAPLSNVQRMKFTKGGAPFVLDFLPKVDYLPLSLMVTAFKKEDVKKPLEGFGVLIPYKEQQKHGLKTLGTLFSSMMFPDRAPDDQYLYTTFVGGSHNRDLAGAPTSILKQLVTSDLKKLLGVQGQPTFVKHIYWGNAFPLYGHDYNSVLEAIEKMEKNLPGFFYAGNNKDGLAVGSVIASGSKAADLAISYLESHTKHNNLH

SEQ ID NO: 29 - protein, 477 aa, Arabidopsis sp.
MASGAVADHQIEAVSGKRVAVVGAGVSGLAAAYKLKSRGLNVTVFEADGRVGGKLRSVMQNGLIWDEGANTMTEAEPEVGSLLDDLGLREKQQFPISQKKRYIVRNGVPVMKKSSKVSDASAEESVSEFFQRHFGQEVVDYLIDPFVGGTSAADPDSLSMKHSFPDLWNVEKSFGSIIVGAIRTKFAAKGGKSRDTKSSPGTKKGSRGSFSFKGGMQILPDTLCKSLSHDEINLDSKVLSLSYNSGSRQENWSLSCVSHNETQRQNPHYDAVIMTAPLCNVKEMKVMKGGQPFQLNFLPEINYMPLSVLITTFTKEKVKRPLEGFGVLIPSKEQKHGFKTLGTLFSSMMFPDRSPSDVHLYTTFIGGSRNQELAKASTDELKQVVTSDLQRLLGVEGEPVSVNHYYWRKAFPLYDSSYDSVMEAIDKMENDLPGFFYAGNHRGGLSVGKSIASGCKAADLVISYLESCSNDKKPNDS

SEQ ID NO: 30 - protein, 544 aa, Zea sp.
MLALTASASSASSHPYRHASAHTRRPRLRAVLAMAGSDDPRAAPARSVAVVGAGVSGLAAAYRLRQSGVNVTVFEAADRAGGKIRTNSEGGFVWDEGANTMTEGEWEASRLIDDLGLQDKQQYPNSQHKRYIVKDGAPALIPSDPISLMKSSVLSTKSKIALFFEPFLYKKANTRNSGKVSEEHLSESVGSFCERHFGREVVDYFVDPFVAGTSAGDPESLSIRHAFPALWNLERKYGSVIVGAILSKLAAKGDPVKTRHDSSGKRRNRRVSFSFHGGMQSLINALHNEVGDDNVKLGTEVLSLACTFDGVPALGRWSISVDSKDSGDKDLASNQTFDAVIMTAPLSNVRRMKFTKGGAPVVLDFLPKMDYLPLSLMVTAFKKDDVKKPLEGFGVLIPYKEQQKHGLKTLGTLFSSMMFPDRAPDDQYLYTTFVGGSHNRDLAGAPTSILKQLVTSDLKKLLGVEGQPTFVKHVYWGNAFPLYGHDYSSVLEAIEKMEKNLPGFFYAGNNKDGLAVGSVIASGSKAADLAISYLESHTKHNNSH

SEQ ID NO: 31 - protein, 544 aa, Zea sp.
MLALTASASSASSHPYRHASAHTRRPRLRAVLAMAGSDDPRAAPARSVAVVGAGVSGLAAAYRLRQSGVNVTVFEAADRAGGKIRTNSEGGFVWDEGANTMTEGEWEASRLIDDLGLQDKQQYPNSQHKRYIVKDGAPALIPSDPISLMKSSVLSTKSKIALFFEPFLYKKANTRNSGKVSEEHLSESVGSFCERHFGREVVDYFVDPFVAGTSAGDPESLSIRHAFPALWNLERKYGSVIVGAILSKLAAKGDPVKTRHDSSGKRRNRRVSFSFHGGMQSLINALHNEVGDDNVKLGTEVLSLACTFDGVPALGRWSISVDSKDSGDKDLASNQTFDAVIMTAPLSNVRRMKFTKGGAPVVLDFLPKMDYLPLSLMVTAFKKDDVKKPLEGFGVLIPYKEQQKHGLKTLGTLFSSMMFPDRAPDDQYLYTTFVGGSHNRDLAGAPTSILKQLVTSDLKKLLGVEGQPTFVKHVYWGNAFPLYGHDYSSVLEAIEKMEKNLPGFFYAGNSKDGLAVGSVIASGSKAADLAISYLESHTKHNNSH

SEQ ID NO: 32 - protein, 509 aa, Lemna perpusilla
MEADAGKGSAGGAQILSHDSVRSVAVIGGGISGLAAAYKLKSNGFRAVVFEAEGKAGGKIRSGSQEGLIWDEGANTMAESVEAGELFDDVGIREKQQYPLSQSKRYVVRNGVPVMIPSDPISLIKSNLLSTKAKFRMFLEPFFSYRRVKPSKVSDEKLSESVGEFFQRHFGKEVVDYLIDPFVAGTSGGDPESLSMPHAFPEIWNLQEKYGSVILGAIQSKFLDKRKGDRTERATVKKRRPRGSFSFHGGMQTLIDVLCAKVGEENLELNSKVLSLACGHEGDPSFDSWSISVASNNGSQKDLLTKSFFDAVIMTAPLGNVEDMKFTKKGSPFALDFLPQVTYLPLSVLITSFKRENVKRPLEGFGVLVPSKEQEGGFKTLGTLFSSAMFPDRAPSDQYLYTTFIGGSRNRDLAGASLEELKQIVLSDLHKLLGVVGEPSFIKHVYWSKAFPLYGRDYGLVMEAIDRMERNLPGFYYAGNHRDGLSVGKAIASGFRAADLAISYINSSV

SEQ ID NO: 33 - protein, 544 aa, Lemna perpusilla
MASSAAISPLHFSPAPPRRRELSHRCRVRCSIAGKPPATAANDSSATSVTGGEPVRRLRADCVIVGAGISGLCTAQALTVRPAAGRSSAPDVLVTEARDRVGGNITTVERDGYLWEEGPNSFQPSDAVLTMAVDSGLKDDLVLGDPDAPRFVLWKGKLRPVPAKPTDLPFFDLMSIGGKIRAGFGALGLRPSPPSREESVEEFVRRNLGDEVFERLIEPFCSGVYAGDPSKLSMKAAFGKVWKLEQTGGSIIGGTFKAIQERSKNPKPPRDPRLPTPKGQTVGSFSKGLAMLPNAIASRLGDKVKLSWKLSGIKKSENGGYALTYDTPEGLTSVNADCVVLTIPSYVAGDLLRPLSNEAADALTKFYYPPVAAVTISYPSDSIRSECLIDGQLKGFGQLHPRSQGVETLGTIYSSSLFPNRAPPGRVLLLNYIGGSTNTAIVSKTESELVEAVDRDLRKMLVKVNAADPAVQGVRVWPRAIPQFLIGHTDLLDAATRSLDRAGYGGLILGGNYVAGVALGRCIEGAYDTAAKVNSFLSKYARSF

SEQ ID NO: 34 - protein, 482 aa, Populus sp.
MTAAAKDDDFGSKQSKNVAVIGAGVSGLAAAYKLKSNGVKVTVFEAEGRAGGKLRSVSHHDLVWDEGANTMTESEVEVKSLLDDLGLREKQQFPIAQNKRYIVRNGMPVLIPTNPVALIKSNFLSAQSKLQIILEPFLWKKNESSKVSDADIQESVGEFFQRHFGKEVVDYLIDPFVAGTSAGDPESLSARHNFPDLWNLEKRFGSIIAGAVKAKLSAKKEKNGEKKGSSEKKKRQHGSFSFLGGMQTLTDTLCTELGKDGVKLESKVLSLSYSYDGKSTFENWSVSYASKGGKHAQASSYDAVIMTAPLCNVKEININKGRNRFSLDFLPQMSYMPLSVIITTFKKEDVKRPLEGFGVLVPSKEQQNGLKTLGTLFSSMMFPDRAPKDSYLYTTFVASTVLDCSHYYWSKAFPLYGKNYDLVLEGIERMEKNLPGFFYAGNHRGGLSVGKAIASGCKAADLVISHLNSSADDKMLKKGSQS

SEQ ID NO: 35 - protein, 569 aa, Capsella sp.
  source 1..569: note = Capsella (angiosperm)
MHDAGDSHDPFEIHKHVDVELKSGLDAKTLNKGPLDKRLKIIGPEELKTRFDAELSWLLLITMASAKVADNDTKFEAVSGRRVAVVGGGVSGLAAAYKLKSKGLNVTVFEADGRAGGKLRSVMHNGLIWDEGANTMTEAEPEVGTLLDDLGLREKQQFPISQKKRYIVRNGVPVMIPTNPIDLVTSTVLSTQSKFEILLEPFLWKKNDLSSKVSDASAAESVSGFFRRHFGQEVVDYLIDPFVGGTSAADPDSLSIVFVYCLILLILISLPTIHDQMKHSFPDLWNVEKSFGSVIVGAIRTKLAAKGVQILPDMLCKGLSHDELNLDSKVLSLSYNSGSRQENWSLSCVSHNEMQRQNLHYDAVIMTAPLCNVKEMDVMKGGQPFQLNFLPEIKYMPLSVIITTFTKEKVKRPLEGFGVLIPSKEQKHGFKTLGTLFSSMMFPDRCPSDLHLYTTFIGGSRNQELAKASTDELKQVVTSDLQRLLGVEGEPEFVNHYYWRKAFPLYDSSYDSVMEAIDKMEKDLPGFFYAGNHRGGLSVGKSIASGCKAADLVISYLESCSNDKKPEDS

SEQ ID NO: 36 - protein, 544 aa, Brachypodium sp.
MLTSATASPSASTRFSSTCRPCRSDSVPARRPRPVLAMAASDDPRAAPARSVAVVGAGVSGLVAAHRLRKSGVRVTVFEADDRAGGKIRTNSDSGFLWDEGANTMTESALEASRLIDDLGLQDKQQYPNSQHKRYTVKDGAPTLIPSDPIALMKSTVLSTKSKFKLFLEPFLYEKSHTRNSQKVSDNHLSESVGSFFERHFGKEVVDYLIDPFVAGTSAGDPESLSIRHAFPGLWDLEKKYGSIIVGAILSKLTAKGDSTKKADTSSGKGRNKQASFSFHGGMQTLVEGLHKDVGDGNVKLGTQVLSLACSCDRLSASDGWSISVNSKDASSKLAAKNQLFDAVIMTAPLSNVQRMKFTKGGVPFVLDFLPKVDYLPLSLMVTAFRKEDVKRPLEGFGVLIPYKEQQKYGLKTLGTLFSSMMFPDRAPNDQHLFTTFVGGSHNRDLAAAPTAILKQLVTSDLRKLLGVEGQPTFVKHVHWKNAFPLYGHDYDLALEAIGKMENELPGFFYAGNNKDGLAVGNVIASGSKTADLVISYLESHQAR

SEQ ID NO: 37 - protein, 506 aa, Oryza sp.
MAASDDPRGGRSVAVVGAGVSGLAAAYRLRKRGVQVTVFEAADRAGGKIRTNSEGGFIWDEGANTMTESELEASRLIDDLGLQGKQQYPNSQHKRYIVKDGAPTLIPSDPIALMKSTVLSTKSKLKLFLEPFLYEKSSRRTSGKVSDEHLSESVIFLCICRDNQVVDYLIDPFVAGTSGGDPESLSIRHAFPALWNLENKYGSVIAGAILSKLSTKGDSVKTGGASPGKGRNKRVSFSFHGGMQSLIDALHNEVGDGNVKLGTEVLSLACCCDGVSSSGGWSISVDSKDAKGKDLRKNQSFDAVIMTAPLSNVQRMKFTKGGVPFVLDFLPKVDYLPLSLMVTAFKKEDVKKPLEGFGALIPYKEQQKHGLKTLGTLFSSMMFPDRAPNDQYLYTSFIGGSHNRDLAGAPTAILKQLVTSDLRKLLGVEGQPTFVKHVHWRNAFPLYGQNYDLVLEAIAKMENNLPGFFYAGNNKDGLAVGNVIASGSKAADLVISYLESCTDQDN

SEQ ID NO: 38 - protein, 494 aa, Picea sp.
MAEHIHTDQNDKRPLKSVAVVGAGISGLAAAYRLKSQGLAVTIFEADGTTGGKIKSFAQNGLIWEKGANTMTETEPEVGKLIDDLGIRGKQQFPIMQSKRYIVRDGKPQLLPSNPVAFIGSKTLSAQAKLNIFLEPILWKHKNSKEKTPNSPDIYQEESVGDFFRRHFGQEVVDYIVDPFVAGTAGADAESLSIRHMFPEIWDLEERFGSIITGAIKSSWSRKKAQRDAKHVTHGQKRQRGSFSFMGGLQTLTNALSKKLGEESLRMHCSVLSLSCNLQGNPPHNNWSVCYARNDASYKEPLKEQSFDAVVMTVTYLPMSIIITTFKKQDVKHPLEGFGILVPSKEEKNGFQTLGTLFSSNMFPDRAPTDQYLFTTFIGGNRNRKLAKSQLKDLQEVAVNDLNKILGVGSDPLSVKHIYWNEAFPLYSLDYNSVVAAIDKLGKSLPGIYFAGNYRGGLSVGKALTSGFKAADLAISDFNSKGLCTMIGTDHEVK

SEQ ID NO: 39 - protein, 404 aa, Solanum sp.
MAPSAGEDKQNCPKRVAVIGAGVSGLAAAYKLKIHGLNVTVFEAEGRAGGKLRSLSQDGLIWDEGANTMTESEGDVTFLLDSLGLREKQQFPLSQNKRYIARNGTPTLIPSNPIDLIKSNFLSTGSKLQMLFEPLLWKNNKLTKVSDEHESVSGFFQRHFGKEVVDYLIDPFVAGTCGGDPDSLSMHLSFPELWNLEKRFGSVIVGAIRSKLSPIKEKKQGPPKTSVNKKRQRGSFSFLGGMQTLTDAICKDLKEDELRLNSRVLELSCSCSGDSAIDSWSIFSASPHKRQAEEESFDAVIMTAPLCDVKSMKIAKRGNPFLLNFIPEVDYVPLSVVITTFKKESVKHPLEGFGVLVPSQEQKHGLKTLGTLFSSMMFPDRAPNNVYLYTTFVGGSRNRELAKA

SEQ ID NO: 40 - protein, 549 aa, Oryza sp.
MLSPATTFSSSSSSSSPSRAHARAPTRFAVAASARAARFRPARAMAASDDPRGGRSVAVVGAGVSGLAAAYRLRKRGVQVTVFEAADRAGGKIRTNSEGGFIWDEGANTMTESELEASRLIDDLGLQGKQQYPNSQHKRYIVKDGAPTLIPSDPIALMKSTVLSTKSKLKLFLEPFLYEKSSRRTSGKVSDEHLSESMFSDQREYICSVIFLCICRDNQVVDYLIDPFVAGTSGGDPESLSIRHAFPALWNLENKYGSVIAGAILSKLSTKGDSVKTGGASPGKGRNKRVSFSFHGGMQSLIDALHNEVGDGNVKLGTEVLSLACCCDGVSSSGGWSISVDSKDAKGKDLRKNQSFDAVIMTAPLSNVQRMKFTKGGVPFVLDFLPKVDYLPLSLMVTAFKKEDVKKPLEGFGALIPYKEQQKHGLKTLGTLFSSMMFPDRAPNDQYLYTSFIGGSHNRDLAGAPTAILKQLVTSDLRKLLGVEGQPTFVKHVHWRNAFPLYGQNYDLVLEAIAKMENNLPGFFYAGKSMKAPLLYKRNLRYLKHIPVD

SEQ ID NO: 41 - protein, 549 aa, Oryza sp.
MLSPATTFSSSSSSSSPSRAHARAPTRFAVAASARAARFRPARAMAASDDPRGGRSVAVVGAGVSGLAAAYRLRKRGVQVTVFEAADRAGGKIRTNSEGGFIWDEGANTMTESELEASRLIDDLGLQGKQQYPNSQHKRYIVKDGAPTLIPSDPIALMKSTVLSTKSKLKLFLEPFLYEKSSRRTSGKVSDEHLSESMFSDQREYICSVIFLCICRDNQVVDYLIDPFVAGTSGGDPESLSIRHAFPALWNLENKYGSVIAGAILSKLSTKGDSVKTGGASPGKGRDKRVSFSFHGGMQSLIDALHNEVGDGNVKLGTEVLSLACCCDGVSSSGGWSISVDSKDAKGKDLRKNQSFDAVIMTAPLSNVQRMKFTKGGVPFVLDFLPKVDYLPLSLMVTAFKKEDVKKPLEGFGALIPYKEQQKHGLKTLGTLFSSMMFPDRAPNDQYLYTSFIGGSHNRDLAGAPTAILKQLVTSDLRKLLGVEGQPTFVKHVHWRNAFPLYGQNYDLVLEAIAKMENNLPGFFYAGKSMKAPLLYKRNLRYLKHIPVD

SEQ ID NO: 42 - protein, 405 aa, Eutrema sp.
MAPDAVADHDKKFEALSGKRVAVVGAGVRLKSRGLNVTVFEADGRAGGKLRSVMHKGLIWDEGANTMTEAEPEVGSLLDDLGLREKQQFPISQKKRYIVRNGLPVMIPTNPIALVTSSVLSTHSKFQILLEPFLWKKNDSSSKVSDASTVESVSGFFQRHFGQEVVDYLIDPFVGGTSAADPDSLSMKHTFPDLWNIEKSFGSIIVGAIRTKFAAKGGKSGETRTSPGTKKGSRGSFSFKGGMQILPDMLCKDLSHDELNLDSKVLSLSYNSGSRQENWSLSCVSHNETLRQNLHYDAVVMTAPLCNVKEMKVVKGGQPFQLNFIPEIKYMPLSVIITTFTKEKVKRPLEGFGVLIPSKEEKHGFKTLGTLFSSMMFPDRCPSDLHLYTTFVGGSRNQELAKAST

SEQ ID NO: 43 - protein, 520 aa, Selaginella sp.
MAMAEGETAPVLGSVAVVGAGASGLAAAYRLRAAGVSVTVYEAENSIGGKLKSVSENGFIWEKGPNTMTENDPSISRMFDDLHLRDKQQFPVEQKKRYIVRNASPTMLPSNPLGFITTGLFSAQAKLKLLTEPFSWKRTKAESNEDESVGAFMERHFGDEIVDYAVDPFVAGTSGSDPSSISIRHSFPELWSLEKNYGSLFVGAIKSGFSKKKKQKLRPVEFEDEDSDFPARTRPRRGGSFSFVGGMQTLANELVSRIGKEKFKLNTFVTGLACNQQGNPSRQSWTVTGLETSGKRSKRSDKTFDAVIMTAPVDDVRAMKVVKDGKPYALDYLPTVIYEPMSVLITMFNKDSVKRALPGFGVLVPSKEQQANGFQTLGTLFSSFMFPDRAPEDQLLFTTFIGGSRNTLLASRSKEELLDITLKDLSRLIGVEGQPTAIRHVYWEKAFPRYSIGYDNVLHSIQKLESDLPGLFYAGNHRGGLAVGKTIVSGLDAAEQVLQYLQGSGGKKVFTMASLEQPVS

SEQ ID NO: 44 - protein, 514 aa, Selaginella sp.
MAMAEGETVPVLGSVAVVGAGASGLAAAYRLRAAGVSVTVYEAENSIGGKLKSVSENGFIWEKGPNTMTENDPSISRMFDDLHLRDKQQFPVEQKKRYIVRNASPTMLPSNPLGFITTGLFSAQAKLKLLTEPFSWKRTKAESNEDESVGAFMERHFGDEIVDYAVDPFVAGTSGSDPSSISIRHSFPELWSLEKNYGSLFVGAIKSGFSKKKKQKLRPVEFEDEDSDFPARTRPRRGGSFSFVGGMQTLANELVSRIGKEKFKLNTFVTGLACNQQGNPSRQSWTVTGLETSGKRSKRSDKTFDAVIMTAPVDDVRTMKVVKDGKPYALDYLPTVIYEPMSVLITMFNKDSVKRALPGFGVLVPSKEQQANGFQTLGTLFSSFMFPDRAPEDQLLFTTFIGGSRNTLLASRSKEELLDVTLKDLSRLIGVEGQPTAMRHVYWEKAFPRYSIGYDNVLNSIQKLESDLPGLFYAGNHRGGLAVGKTIVSGLDAAEQVLQYLQGSGGKKVFTMAS

SEQ ID NO: 45 - protein, 230 aa, Amaranthus sp.
MVIQSITHLSPNLALPSPLSVSTKNYPVAVMGNISEREEPTSAKRVAVVGAGVSGLAAAYKLKSHGLSVTLFEADSRAGGKLKTVKKDGFIWDEGANTMTESEAEVSSLIDDLGLREKQQLPISQNKRYIARDGLPVLLPSNPAALLTSNILSAKSKLQIMLEPFLWRKHNATELSDEHVQESVGEFFERHFGKEFVDYVIDPFVAGTCGGDPQSLSMHHTFPEVWNIEK

SEQ ID NO: 46 - protein, 229 aa, Amaranthus sp.
MVIQSITHLSPNLALPSPLSVSTKNYPVAVMGNISEREEPTSAKRVAVVGAGVSGLAAAYKLKSHGLSVTLFEADSRAGGKLKTVKKDGFIWDEGANTMTESEAEVSSLIDDLGLREKQQLPISQNKRYIARDGLPVLLPSNPAALLTSNILSAKSKLQIMLEPFLWRKHNATELSDEHVQESVGEFFERHFGKEFVDYVIDPFVAGTCGDPQSLSMHHTFPEVWNIEK

SEQ ID NO: 47 - protein, 396 aa, Zea sp.
MKSSVLSTKSKIALFFEPFLYKKANTRNSGKVSEEHLSESVGSFCERHFGREVVDYFVDPFVAGTSAGDPESLSIRHAFPALWNLERKYGSVIVGAILSKLAAKGDPVKTRHDSSGKRRNRRVSFSFHGGMQSLINALHNEVGDDNVKLGTEVLSLACTFDGVPALGRWSISVDSKDSGDKDLASNQTFDAVIMTAPLSNVRRMKFTKGGAPVVLDFLPKMDYLPLSLMVTAFKKDDVKKPLEGFGVLIPYKEQQKHGLKTLGTLFSSMMFPDRAPDDQYLYTTFVGGSHNRDLAGAPTSILKQLVTSDLKKLLGVEGQPTFVKHVYWGNAFPLYGHDYSSVLEAIEKMEKNLPGFFYAGNNKDGLAVGSVIASGSKAADLAISYLESHTKHNNSH

SEQ ID NO: 48 - protein, 414 aa, Aegilops sp.
MTESALEASRLIDDLGLEDRLQYPNSQHKRYTVKDGAPALFKLFLEPFLYEKSSTRNSKKVSDEHLRESVGSFFERHFGREVVDYLIDPFVAGTSAGDPESLSIRHAFPGLWNLEKKYGSLIVGAILSKLTAKGDSSKKGGASSGKGRSKRASFSFHGGMQTLVDALHKEVGDSNVKLGTQVLSLACNCDELSASDGWSIFVDSKDASSKELAKNQSFDAVIMTAPLSNVQRMRFTKGGAPFVLDFLPKVDYLPLSLMVTAFKKEDVKRPLEGFGVLIPFKEQQKHGLKTLGTLFSSMMFPDRAPNDQYLFTTFIGGSHNRDLAGAPTAILKQFVTSDLTKLLGVVGQPTFVKHIHWRNAFPLYGHDYDSALEAIGKMERNNKDGLAVGNVIASGSNTADLVISYLESGIKQVS

SEQ ID NO: 49 - protein, 304 aa, Genlisea sp.
GFPAKNVAVIGAGVSGLSAAYKLKLNGLNVTVFEADGRAGGKIRTSSQDSLIWDEGANTMTESEEEVGFLLDNLGLREKQQFPLSQQKRYVVKNGKPALLPSNPFALIASNILSSSSKLQIFLEPFLWKQRNSEETQAEESVGGFFQRHFGKEVVDYLVDPFVAGTSGGDPESLSMRHAFPDLWNLEKRFGSVMSGAVLSKLSAGRGASEKNKGSSTNERRKRKSFSFIGGMQTLTDALSNEIGENELKLRSKVLGLSSNNVKSSKVDSWSISYASSDGKSVSLDTGFDAVIMTAPLSDVKQMK

SEQ ID NO: 50 - protein, 265 aa, Amborella sp.
MSSKGEEKGKHEATRRKPKHQRGSFSFQGGLQTLTDKLAEELGNENVKLHSKVLSLSYGDGNGDSFSNWSVSYIKNQSDQRKLLLKQSFDAVVMTAPIRNMQEMQISKCGKPYMLDFLPNVMYLPLSIIVTTFKKENVKLPLEGFGVLVPSKEQGSGLRTLGTLFSSMMFPDRAPKDQYLYTTFVGGSRNRNLASASLDELREVVTCDLKKLLGVVGAPTFVRHVYWGDAFPLYGHNYDMVLKAIEKMEQNLPGFFYAGKFSLWC

SEQ ID NO: 51 - protein, 469 aa, Rhodothermus sp.
MASVGIIGAGIAGLTAAYELHRRGLEVTVFEATDRIGGFIQSERIDGFLVELGPQTLQRTSGDFEELLRQVDLEDACIPARPVAANRFIVRGGQPIPLPRSPRELLRTPLLSPRARLRLLAEPFIHRAHRSTEESVAKFTRRRLGPEVLDYLVEPFVAGIFAGDPEQLSVRYAFPKLFELEQQYGSLFWGLIRDRMKQRYHPAPRRSMFSFVEGLHMLPRALAERLPAHAIVRNAEVLAIRWDEKNPWTLTFRQHGRASTRFFDIIVCAVPLHRLAQLRIHPPVDRRPLSTVEHPPIALVALGFRREQVAHPLDGFGMLVPAVERDFQILGTLFSSSLFPDRAPEGHVLLTTFVGGMRHPELALLPEDRLEALVLQDLRRLLGISGAPVFRHVWRWERSIPQYRLGYDAVLACVHDVEMSRSGLFLAGNYMEGISVIDALHTGLKAARAIIQHLREEAAGGLAKLVLGD

SEQ ID NO: 52 - protein, 461 aa, Salinibacter sp.
MPNVGIIGAGISGLAAAYRLQEHGHSVRLLEASGHTGGVIRSESSEGFLVEHGPNSIRAGAAGLETLIDALDLHEDRVWANDAADTRYVVRDGRPTPLPRSVGSFLTTDLFSTRAKLRLLAEPFIGRAAAEEESVARFTERRLGPEVLNYAVAPFVGGVFAGRPDDLSVQHAFRRLAALEEESGSLLLGAIRRALTSDDGAPPDTPSGLFSFRNGLQTLPNALADTLGDRIRLNAPVHALAHDGTAWRVTVSPPDAPAHTRSFDALVCTVPLHRLAAMEIDTPVDLAPLGEVTYPPLSVLALGYGRDAIDHALDGFGMLVPPVEDTLDVLGTIFSSTLFPGRAPEGHVLLTTFVGGARAPHHATSDAAALQARVARDLDSLLGVDASPVFRRLVHWPHAIPQYELGYGTVKDTFDALEAAHPHLAFAGNYRAGVSVGDALTSGLEAADRLLETDERAAQPH

SEQ ID NO: 53 - protein, 461 aa, Salinibacter sp.
MPNVGIIGAGISGLAAAYRLQEHGHSVRVLEASGHTGGVIRSESSEGFLVEHGPNSIRAGAAGLETLIDALDLHEDRVWANDAADTRYVVRDGRPTPLPRSVGSFLTTDLFSTRAKLRLLAEPFIGRAAAEDESVARFTERRLGPEVLNYAVAPFVGGVFAGRPDDLSVQHAFRRLAALEEESGSLLLGAIRRALTSDDGAPPDTPSGLFSFRNGLQTLPNALADTLGDRIRLNAPVHALTHDGTAWRVTVSPPDAPAHTRSFDALVCTVPLHRLAAMEIDTPVDLAPLGEVTYPPLSVLALGYERDAIDHALDGFGMLVPPVEDTLDVLGTIFSSTLFPGRAPEGHVLLTTFVGGARAPHHATSDAAALQARVARDLDSLLGVDASPVFRRLVHWPHAIPQYELGYGTVKDTFDALEAAHPHLAFAGNYRAGVSVGDALTSGLEAADRLLETDERATQPH

SEQ ID NO: 54 - protein, 203 aa, Zea sp.
MTAPLSNVRRMKFTKGGAPVVLDFLPKMDYLPLSLMVTAFKKDDVKKPLEGFGVLIPYKEQQKHGLKTLGTLFSSMMFPDRAPDDQYLYTTFVGGSHNRDLAGAPTSILKQLVTSDLKKLLGVEGQPTFVKHVYWGNAFPLYGHDYSSVLEAIEKMEKNLPGFFYAGNNKDGLAVGSVIASGSKAADLAISYLESHTKHNNSH

SEQ ID NO: 55 - protein, 469 aa, Rhodothermus sp.
MASVGIIGAGIAGLAAAYELHRRGLEVTVFEATDRIGGFIQSERIDGFLVEHGPQTLQRTSGDFEELLRQVDLEDACITARPIAANRFIVRGGRPIPLPRSPRELLRTPLLSPRARLRLLAEPFIHRAHRSTEESVAKFARRRLGPEVLDYLVEPFVAGIFAGDPEQLSVRYAFPKLFELEQQYGSLFWGLIRDRMKQRYHPAPRRSMFSFVEGLHMLPRALADRLPAHAIVRNAEVLAIRWDEKNPWTLTFRQHGRASTRFFDIIVCAVPLHRLAQLRIHPPVDRRPLSTVEHPPIALVALGFRREQVAHPLDGFGMLVPAVERDFQILGTLFSSSLFPDRAPEGHVLLTTFVGGMRHPELALLPEDRLEALVLQDLRRLLGISGAPVFRHVWRWERSIPQYRLGYDAVLACVHDVEMSRSGLFLAGNYMEGISVIDALHTGLKAARAIIQHLREEAAGGLAKLVLGD

SEQ ID NO: 56 - protein, 453 aa, Caldithrix sp.
MTVAVIGAGISGLTTAYYLKQQGVDVQVFEKNNYIGGSVITEKKDGFLIDLGPNSTLETSQVLRQLIDQIGLQSQKVYASDVSNKRYVVRDGLLHALPLSPPAFIKTKLFSWKAKLQLLKEPFLPKVEVDDISLADYVRYRLGDEFLDYAINPFVAGVYAGDPEQLSAPAAFPKLYNLEQNYGSFIKGAIKGKRERKKRQEVAKDRAKMFSFLDGMQVFPQALARQLGEVIHLNCEVREVIPHGKGFKVVLEQDSGEQECFFERVVISVPTYVQAKILNSILKERAALLADVLHPPIAVVFMGFKRDDVAHALDGFGFLLPAKEKKQILGSIFSSTIFPQRAPQGKVAFTTFVGGMRNPDNALKDDEEIKELVLKDLNDLVGLHGQPVLTRIRRWPRAIPQYTLGYKKIQALFDELEQEFSGLFFAGNFRRGISVGDSVLSAFETSEKMLKEK

SEQ ID NO: 57 - protein, 467 aa, Opitutus sp.
MSTSPFNPSATASGRPPKTFAVLGAGITGLTAAHRLTQLGHKVRVFEQSDRVGGSIKTEEVDGWLIEGGPNTLLSGELAVDKLIDELGLNGERIAADPAAKNRYIVRRGRALAAPMSPPSFFASSLFSPVAKFKLLAELFARRRVRTTDVSLAEFVESHFGREFVDYALNPFVGGVYAGDPEKLSARQSFPKLWEIEQTHGSLIRGQIAAAKARKARGEPRPGIFSFKHGLHVLPEALAARLPAGAITLGASLDAIVPGDKWNVVWHDDVATHTQSFDSVVVALPAPALARLQIGTLGEKPLAALALIEHPPVSSLFLGFRREQVAHPLDGFGVLVPAVEKRSVLGVLFSSSLFPGRAPLGHVALTVMVGGTRQPQLASLPADQLLAAVRPDLTQLLGVSGDPVFVRHNFWPRAIPQYNLGHEHFIAALAAGERFHPGLFMGGQARDGIAVPACIAAGEKLAERAGQ

SEQ ID NO: 58 - protein, 455 aa, Verrucomicrobia sp.
MGNPNKTIAILGGGITGLTAAYELLKLGHKPTVFESSSRIGGAIETIRQNDFLAECGPNTLLETSPRISALISDLGLDSRKRYANPSMKNRYIIKGGKPVPMPLSPGQFVTTKLFSLGAKLNLIKEPFIAPCPSETEESLAAFVVRRLGQEFLDYAINPFVAGVYAGDPSKLSVQHAFPKLYALEQQYGSMIKGQFFGARERKKRGTVSKDKAKLVSFDQGLEVLVDGLGQKIEDTINISTVIESVEKAEEKWVVQGRKIRESFDAVITAIPTHRMTKMTFRDESDLDMSILRDIIYPPVSSVVMGFRRDQIQHSLEGFGMLVPKVERKNILGTIFSSSLFENRAPEGYVTLSTYIGGMRQPDHALLDDQEMDRLILKDLEALLGVRGEPAFINRRVWKKAIPQYTVGYGKILDRFNELEAAHSGLFFAGHYRNGISLGDSILAGLDVAQRINQQ

SEQ ID NO: 59 - protein, 462 aa, Ignavibacterium sp.
MTKTIVVIGAGISGLTTAYLLSKRGFNIRILERKSEVGGSIESIKENGFLFDRGPNSALETTPLISQLVEELNLKDELLYANKAANKRYILRNNELHALPMSPPALIKTKLFSAKAKLRLLTEPFIGRSEDGYYQSLAEFVRRRLGQEFLDYAINPFVAGVYAGKPEELSVKSAFPKLYALEEKFGGLIIGTIRSIRERKKRAEKSKQSARMLSFKSGMISLPKAIANYFADKLILSAEVISVDKTAEGFIVSYRHSGIDEAIVCDAVLSTVPSYVAGNLFSKFDKKFKVHSDEIYYPPVLVYFLAYEKKNIGQTLDGFGFLIPEKENKSFLGALWSSVIFPYRADNNFATFTLFIGGSRYPDFVKEDRNKLLEKVRKEFEQLMKIKSDPVFSAYRFWEKAIPQYNIGYIEHERFFDEFEKQNPGLFISGNFRGGISVGDCIKNAELVANKICVQFTMHNVQ

SEQ ID NO: 60 - protein, 457 aa, Coraliomargarita sp.
MEKKAIVIGAGISGLCAAIELKKSGFNVTVVEKRERAGGVIGTTARDGFRAESGSNTVMVNSQKTLDFLMEIGLKDKIVNSSPAAKKRFFARYGKPQAVPMGPLQLLTTRLFSFAGKLRMLCEPFIKPPSQDSDPSVADFTAERFGREVLDYAMNPFMAGIYGADPEKLSIKHAFPPFWNLAIKYGSVIKGAMKARREKMAAGNFFKPVMISFKSGMHTLTDALAAELGDSVKCGAKVISIDSNCDGWEVSWGTETEDVCENYDALVVAVPAPEISGLPFGGMLAAALAPLAKIQYAPVATYTMGFKRQDVSHPLDGFGVLTPKKENFSILGSLFVSTLFDDRAPDGYIALTNYVGGMRHPEFAALERGEMRKLVLEDLKKLLGVNGEPVFEELFVWKNAIAQYNVGYQEYLDIMDDIEKRIPNIALVGAYRGGVGVSSCLENGLLSAAKLAGRISD

SEQ ID NO: 61 - protein, 465 aa, Salisaeta sp.
MARIGIIGAGIAGLTAAYQLQQQGHMVRVWEARGVAGGAIRSERTSDGFLVEHGPNSLRATTPIVPRLLEDLGLERARLSAAPAATKRFIVRDGTLRPLPLSPPALLTTSLLSTRAKLRLLREPFVAAGAPTADETVASFVRRRLGPEVLAYAVDPFVAGIFAGDPHRLSLKHAFGRLYEMERTHGSLLRAALHSARTGATDDASTATDRRIFSLRDGLQMLPHALADALGEAIRYEAPVTALRQMPDGTWTVATETDATQVNALISTVPLHALGSIDWAPAVDTSPLQRVPYPPVRVVALGFRRADVAHPLDGFGMLVPSAEDQFQILGTLVSSTLFPGRAPAGHVLLTTFVGGMRHPTLGAASDAAVRKVVLNDLQALLGVQGAPVFERFIAWPRAIPQYTLNHGAAVRTLEQLEDVHPGLFFAGNYRDGISVGDAMASGEDAARRVDAHLAGADRAVAATGP

SEQ ID NO: 62 - protein, 179 aa, Ambrosia sp.
MASPTIVDNQKPAKRVAIVGAGVSGCAAAYKLKLHGLNVTVFEADERVGGKPRSVSQDGLIWDEGANTMTESEADASSLIDELGLRDKQQFPISQHKRYIVRNGKPVLIPSNPIALIRSSFLSTQSKVQILLEPFLWKKTKSSDEPESVGGFFQRHFGKEVVEYLIDPVVAGTSGGDPK

SEQ ID NO: 63 - protein, 451 aa, Melioribacter sp.
MSKKIVVLGAGISGLSTAYWLVKKGYDVTILETKNEPGGSMISRRLDNFLIDYGPNSGLETTPLIRKLVEEVNLSDKMIYANAAASKRYILKNGELIPLPMSPGSFIRTKLFSSGAKFRLMAEPFVSKSDDGYYQSIAEFVRRRLGNEFLDYAIDPFVSGVFAGDPEKLSVKSAFPKLYRLEEVYGGLIKGMIKGARERKQRNEESKQSAKMFSFLEGMQSLPNAIADKLKDNIVFSAKVLNVTGANDKQWKVTYELNGNRESITADTVISTLPAYIAAGVFGELDQKLAERLNSIYYPPVMVLYLGYNKKDIKRKLDGFGFLIPSKEKKHFLGAIWSSSIFPGRSPEDMAAFTLFVGGARSPQLFEMEKSDLIKKVLSEFHQIMNIKGEPVLIENKLWQKAIPQYNLGYIEHEKYFEVFEENHRGIYLRGNYRGGISVGDCIKNSELEIK

SEQ ID NO: 64 - protein, 472 aa, Halothiobacillus sp.
MNTHSNASEPINCPYLVIGGGISGLATAYHLSRMGKTVTVLEATSRVGGAVGSIEEDGWLRELGPNSLVQTPEMAALMSALDLVSEIIEANTVAKKRFVAKNGHPVALPGSPLELLTSPLFSMGDLWHLAREAWIKPVNKEETIAEFVRRRLGQGFLDWAVDPFVSGVYAGDPNRLSVQAAIPKIYAFEQESGSLIRGGIAKMKAAKANPAPVTLPAKGKLFSFKRGLQTLTDALATAITSSGRGNIQLDSAITNIQRLPEGGWSVKTVQGKTFHTRQLILSTPAHVSAQLLGEVDGPLAETLAAIEYPPVTSVVMGFDRSEVAHPLDGFGLLLPSKEKKRTLGVLFSSTLFPDRTPAGKVLLSAFIGGRKHPEAAQGDDQELLDRVLGDLSPLLGIKGKPEFLRVKRWQQAIPQYEIGYLELQEKISQRLTALPGLSLNGNWRGGIAVGDCLNNGNKLAERLIENTRTEES

SEQ ID NO: 65 - protein, 480 aa, Chondrus sp.
MPEPVKRNVAVLGGGPAGLSAAFRLLHDLPPGLSVKVDLYEATGRLGGAVTSACDAGFCYELGPNSMNAKHPSVADLIQEKLRLKPRMLPRSPYAKRYYFMRDGKLVPLPLSPLHFATTGLLSWRAKWHVVKEPFVARLQDVRDSHMESVASFFQRRFGREVVDYLVDPMVAGTYSGKPADLSMKHALRKVWRLEQKHGSVIGALLRGAGKTKPDPRYKPYTGKELRASFTYDKGMEVVTDALVANINDLNPRGGRLYTHGKVRTLDRDPNGAWRINGRGKYDAVISTIPTHAVKSIYTNMSALGKGFKKLNKSIKYAPVSVVVMGFDKSQVPHPLDGFGALIPTVEGRQILGINFSSSNYPQRLSDPDKVFLTVYVGGQRNPDLPFRRAKEIVDISKKELGHVLGVKGDPFFSRVKTWKRGIPQYDPQFDESLCTMARAEKSAKGFVFGGNYRDGVGLPDALRSGILSAEKTLQYLKTL

SEQ ID NO: 66 - protein, 463 aa, Rubritalea sp.
MRKHIAIIGAGVSGLSTAYHLQQAGHSVVVFESSKRAGGVIQTIREDDYLCEWGPNSLMIGDKRIEALLKSIGLDDEILEANTASKKRFIIDRDRLQALPNGPFQLLGSPIFSLKAKLRLLKEPWVKRHPANSKETLADFMERRLGPEPVAKLVNPFISGIYAGDPKRLAVEHAFPKLFQLEQDYGSLIWGMIRSKKDQKNSFKSKHKLQKRRIVSFKQGMEALPQAMAAALDEGTLIFEAKIGGISQNRNNKRWHMDWKCPNGTIGQGSFDAVILTQASHHLNDIPLDEEVLESLSKLPSIDHAPVTSMLLGFKREQIKHPLDGFGMLSTFEQKSKMLGALFTSSLFPGRAPEGHVAINVMIGGVRRPELCELPEPTLRANILDELRRLLGVDGKPSFCHIHHTSKAIPQLHTDYGIVAQQIIDCEREHPGLYLAGSYRNGIALPDRLLEGISLTEKINQSL

SEQ ID NO: 67 - protein, 457 aa, Acidobacteria sp.
  source 1..457: note = Acidobacteria (phylum)
MGVEVAIIGAGISGLSVAFFLKRAGAGVLVLEAEEDVGGTMRSRRFKGYLIELGPNSALETTPLFQELIAAAGLAGERVYASEAARNRYIVRGGELHPLPLTPLAFLRSRLWSWKGKLRVLAEPFHGRADREESVADFARRRVGQEFLDYAVNPFVAGIYAGDPERLSVRFAFPRLYALEAQYGGLFLGMLRGARERRRRGEAPKIAARLFSFREGMGALPRALAAALGNTVWCATRALCVERAGAAFEIAFERDGRRDTLRAERVVLATPAYAAASLLKRLAPEAARALDRIVYPPVSAVILGYPETAIGRPLDGFGFLVPEKEQRRILGTIWNSTIFPARAPQGFVTLTTFVGGMRQPELARRPNEELIALVAEELTDLLRLRGEPEFAYVSRWERAIPQYELGYGEILDALDRAEREHVGLYFCANYRGGIAVGDCVMSAHATAERILRDRARS

SEQ ID NO: 68 - protein, 441 aa, Coraliomargarita sp.
MPDTCIIGAGITGLATAWQYQRKGKDCVVLESGPQVGGAIQSILQDGYLAEEGPNSIQLNSLEIEDFLTSIPGLEAQIIEANPAAQKRYIVRKGRLRAVPMNPLQAITTQLWSIAGKLRVLREPFIKAAPPEPDQSVADFVTRRLGKELYDYAINPLVGGIYAGKPEMLSLRYGFPKLYALEQEHGGLIRGALAKMKAAKANKGPKAKKYILSFKDGLQTLPQSIANNLNEPVQTGVSIESIRQIEDMWAVRWNGQVKAFKELIVTVPAHKLPGLPFEEPIRLPAIDYPPVSVISLGYPLSAIKQPLDGFGALVPEREDRNILGVLFPSAVFDGRAPEGHGLLTVFVGGSRSPECSSPDTDQLLKTIQPDLETLLGIQDEPSFVHHKHWPMAIPQYTLGYEKVLEAITRIEQQYIGLKLAGNYRTGISLSYCLESAIASTN

SEQ ID NO: 69 - protein, 474 aa, Oscillochloris sp.
MNSYDVVVVGAGISGLSAAYTLFKRGLDVLVVEAGAEVGGVMRSIVTPEGYVLDCGPNTLASKDPRMWAEFDDLGMRDRLVVAGRAGKRRYFLKDGQPLEIPNDPIGLLRMEHVSMQAKLRVLREPFIPRATSPDESVASFFSRRIGPEVMERMIDPFVSGVYSGDPSKMSIKATFPSLWEAEQRGGSIIKGFLTAGKAKKAAGEKKAKPIGPKMRSVTFNFKGGVAEWPKTIAKVLGDQRVWKNARVTTLYPESTGWTLVVERDGQVETIEAASVIMAAPAYAAADLIAELDPAAAKGLRGIRYSSMAVVNLGYRENQVTRPVNGFGVLAPSCERRNFLGILSASTLFPPFAPAGRVLTINLMGGEINPIRPEQSDDELIARAIADNQAVIGANGAPEVVNLTRWPRAVAQYNFGHTEAMAALENLERTRPGIYFVGSYRGGVGMPKCWRNGVNMAERVATYLKTRSAVASLR

SEQ ID NO: 70 - protein, 474 aa, Opitutaceae sp.
MPVAVIGGGITGLTAAWRLAREGHPVRLFEASPRPGGLIRSERDGEWLSEAGPNSLLDNKPELAALLAELGLEDARQYAQPAAKKRFIVRRGRPLAAPSSPVSAVTTPLLSLRGKLRIFGDLFWRPRPRAEDLPLGEFAAAHFGRELADYAVDPFVSGIYAGDPQRLSARYAFPLLWELEQKHGSLIRGGIAAAKARRATRPAGPAEKPRPPRARIFSFAEGLETIPAALAERLPAGCVETGARVVRLVPPVARGGAWEVVWERKDEKDEKGASGVEGRLTERVAAVILALPGEALARLEIGANGEHPLAALAEVEYPPVASLFIGYRREQARHPLDGFGMLAPSKENRNLLGVLFSSTLFPGRAPAGHIALTVLAGGVRRPELARMELPSLMGIVRAELLELLGVSGDPVYVKHRVTPHAIPQYNLGYGRFHTVIETAETAHPGLLVGGPVRDGIAVSACVAAGEKLARRVVA

SEQ ID NO: 71 - protein, 239 aa, Amborella sp.
STKSVAVVGGGVSGLTTAYRLKSHGLNVTLYESEGTAGGRIRSIAYGGLIWEEGANTMTESEMEVKRLIDDLGLREKQQFPISQNKRFIARNGTPVLIPSNPLALFGSKLLSPHSKLRVILEPLFWRSSNRKGDISKVSDQNLQESVGDFFQRHFGQEVVDYLVDPFVAGTSAADPNSLSVQVTSMSEICQNYLQYLGWSQGPSSQLMTLTLSPSSVIDQMLSERMVTFLQVMLSPLLM

SEQ ID NO: 72 - protein, 490 aa, Opitutaceae sp.
MSASLPPPPPPPHTHTQARLPVAVIGGGITGLTAAWRLAREGHPVRLFEASPRPGGLIRSERDGEWLSEAGPNSLLDNKPELAALLAELGLEEARQYAQPAAKKRFIVRRGRPLAAPSSPVSAVTTPLLSLRGKLRIFGDLFWRPRPRAEDLPLGEFAAAHFGRELADYAVDPFVSGIYAGDPQRLSARYAFPLLWELEQKHGSLIRGGIAAAKARRATRPAGPAEKPRPPRARIFSFAEGLETIPAALAERLPAGCVETGARVVRLVPPVARGGAWEVVWERKDEKGASGVEGRLTERVAAVILALPGEALARLEIGANGEHPLAALAEVEYPPVASLFLGYRREQVRHPLDGFGMLAPSKENRNLLGVLFSSTLFPGRAPAGHIALTVLAGGVQRPELARMELPSLMGIVRAELLELLGVSGDPVYVKHRVTPHAIPQYNLGYGRFHTVIEAAETAHPGLLVGGPVRDGIAVSACVAAGEKLARRVVA

SEQ ID NO: 73 - protein, 474 aa, Chloroflexus sp.
MMAGYDSVVIGGGIAGLAAAYTLHKRGYRVLVIESTNRVGGVIQTITTPEGYILDCGPNTVGTGDARLWQELIDLGLRERITPAAPCSKRRFILINGTPVEIPTSPVGLITTRLLSWRGKLRVLAEPFINRGSTDPDESVAAFFTRRIGAEATAHLLDPFVAGVYAGDPQRLSTAAVFPSLWEAAQRSGSIVRGMLSKPKPKTQVSEPKMRSRTFTFRGGLAEWPRALAQALGAGNVWTERRVVKLQPRDSWWEVTIDGVNGPETLISRSLIIATPAFTAADLIESVDQRAAGALRGIPYAPVAVVHLGFRRDQISQELSGFGVLAPSSEQRQFLGILWTSSIFPHVAPHDHVLTTTLSGGAIRPELAERSDETLIEAAIRDHHQLLGIRGQPIFTHVTRWRTAIAQYTFGHRERIATLVQLEQRLPTIQFAGSYRDGVGVPKTWASGVQAGERIAAALAAHGTTAVSTETASG

SEQ ID NO: 74 - protein, 462 aa, Leptospirillum sp.
MAGFDCDTLVVGGGVSGLAAALTLKNRGVDVRLLESRGYLGGAIRTVREDGYLLEFGPNSLMVRPEDAIDTVLGDPELRARIVPASGLSKNRYVVKAGHLYPVPLSPWAFFRTPLLSWRGRRDILSEWKVPPRTGGPEETLSHFVRRRLGEEALDYFVDPFVKGVYASHPDLLSVEAAFPLLVRLEREHGGLLRGALKTFLKRRKRPSGSSPRGIFSFAGGMTDLVEAMGKRLGEDVGTNVDVIKYTRLEEGFRVALMYDETEYYMTSRRLILATSAPQAAELLEGDPDGPSSELKSIPYAPVTIAYAGFLREQVTHPLDGFGLLCPTVENRKVLGVIFSSSLFPGRAPEGKVLLTVFVGGMTGQKLAQAFDEDLERIVLKELTELLGVKGAPSFFRIHRWEKAIPQLILGHGETVRTIRKKLPSGLRLAGNYLDGISIARAFASGVRAAEELLSEDGGTPG

SEQ ID NO: 75 - protein, 462 aa, Leptospirillum sp.
MAGFDCDTLVVGGGVSGLAAALTLKNRGVDVRLLESRGYLGGAIRTVREDGYLLEFGPNSLMVRPEDAIDTVLGDPELRARIVPASGLSKNRYVVKAGHLYPVPLSPWAFFRTPLLSWRGRRDILSEWKVPPRTGGPEETLSHFVRRRLGEEALDYFVDPFVKGVYASHPDLLSVEAAFPLLVRLEREHGGLLRGALKTFLKRRKRPSGSSPRGIFSFAGGMTDLVEAMGKRLGEDVGTNVDVIKYTRLEEGFRVALMYDETEYYMTSRRLILATSAPQAAELLEGDPDGPSSELKSIPYAPVTIAYAGFLREQVTHPLDGFGLLCPTVENRKVLGVIFSSSLFPGRAPEGKVLLTVFVGGMTGQKLAQAFDEDLERIVLKELTELLGVKGAPSFFRIHRWEKAIPQLILGHRETVRTIRKKLPSGLRLAGNYLDGISIARAFASGVRAAEELLSEDGGTPG

SEQ ID NO: 76 - protein, 446 aa, Verrucomicrobia sp.
MNTKKVCILGAGLSGISLGLSHENKGNQVTIFEKDLRVGGVLQSIKSEGFLMDYGANTLSIRTKKTVDFLKQYEILEHAMDANQESSKRFIIRKNRIISLPQGPLSFLCSSFLSPVGKLRLCLEPFIGRKKDNGSDETMAEFVERRLGREVLDYGVNPFIGGVYAARPESLILKYAFPSLHDTELTFGSIFWGMIRGGAQPSEKISKSRLISFREGMQELPNRLAARMHNPPVLGCEIKKIEFKDDVQWCVQGEKHDGKIQKEVFDQIICTLPSHALDKIEWVGINSSHLLETLTRAYHPPLALVFQGYQQRQIKHPLDGFGFLVPEKERRKILGTLFSSTLFQNRAPENSVLLTTYIGGERNPELCDLPQNEILGHAFRENQDLLGIEGKPIFEHLKLWPKSIPIPDHTLEDRKKAASTLTLENKGLQILGAHINGAPLPNCMVL

SEQ ID NO: 77 - protein, 475 aa, Chloroflexus sp.
MMMANYDSVVIGGGIGGLAAAYTLYKRGYRVLVIEAANRVGGVIHSITTPEGFTLDCGPNTIGTNDVRLWQELIDLGLRDRIRPAARCGRRRYILINGTPIEIPSSPVGLITTRLLSWRGKLRVLGEPFVNIGTPTGEESVAAFFSRRIGHEAVAHLLDPFVAGVYAGDPNQLSAAAVFPSLWEAVQRGGSIVRGMLRRPKQKTLISEPKMRSRTFSFQGGLADWPRAIARALGTGNVWTGRRAVGLRDLGTYWEVTVDGTGRLETITTRSVIIATPAYVAAELVEALDPAAASALRSIPYAPVSVVHLGFRRDQLSHELNGFGVLAPSSERRQFLGILWASSLFPHVAPPDRVLTITLSGGAIRPEVAEQSEEALIESAIRDNQEVLGIRGQPLLTHVTRWHHAIAQYTLGHRERIATLERLEQRRPTLQLTGSYRGGIGIPKTWASGVGAGERIAAALDAQGTTADTLEQARG

SEQ ID NO: 78 - protein, 456 aa, Desulfurobacterium sp.
MKVAVIGAGISGLSVAFYLKKGGAEVKVFEKEKTVGGKMKTIHEDGYIIETGPNGFLDGKPYTLNLVKELGIESKLYRSSDKARKRFIYTNGRLVRLPESPIAFLASYLLSWKGKLRLVGEFLVPPKKEDIDESLSEFAKRRIGEEALEKLLDPMVAGIFAGDPDRLSLKAAFPAIYYLEKQYGGLIKGLIAKMKEAKKSGKKSGPAGPGGVLTSFKGGVKDLIDSLSEFLGDSIETEVEILGLDRIEKGWKVKYKKENEVFEETFDAIVFSTPAYITAKLLNDLNLELSKLLSEIEYSPISVVALGFEKKGLGHDLDGFGFLVPRSEKRKILGALWDSSVFPNRAPSGKALIRVMIGGARQPELALLPDEELVNIALKELRRIMKIRHYPEKIKVFKHEKGIPHYTVGHAERVEKIFRLISKYPGLYLCNNAYTGVGVNDCTKAAEEVARRILDG

SEQ ID NO: 79 - protein, 455 aa, Desulfurobacterium sp.
MKKVAVVGAGVSGLSTAFYIEKFGGDNVSVTIFEKENVPGGKMLTVQKDGFIIETGPNGFLDNKPYTLDLVKDLKIEDRLYRSSDKARKRFVFVNGKLVRLPENPIAFLSSYVMSFKGKLRLAAEYFIPPKKDDSDESLSSFVKRRIGKEALEKLIDPMAAGIFAGDPDKLSVKAAFPAVWHLEKKYGGLIKGLLAMKKEKKDATAGPGGVLTSFKGGVKDLIDALVANIKGEIHPGTTVKKLIPENGKWKIVYEKDDEIFEESFDKVVLSTPSYVAAALVKNFDEKLAEKLYEIEYSPIAVIAFGFIKKGLGHHLDGFGFLVPRSEGRKILGVLWDSSVFPNRAPEGKALIRAMVGGARQPHLALAGEEEIARMTYKDIKRIMKIRHRPIMTAVFKHPKGIPHYTVGHVEKVNEIFKLASNHGGLFLNSNAYRGVGVNDCVYNSLKTAEMVTSE

SEQ ID NO: 80 - protein, 484 aa, Arthrospira sp.
MTNLVDSLIVGAGISGLSLAYSLNREKSVREPLKVLVTESQNRVGGNITTGRADDFLWEEGPNSFAPTPELLGLAVDLGLKEELIFADRKLPRYVYWNLMLHPVPMNPPALLSSELISARGKLRAALGAIGFVPPPVGAHLSQQGGEETITQFFDRHLGSEVLERLVQPFVSGVYAGDPQQLAVRSAFSRIVAAEEAGGGLLPGFVRSRLNKKAPVSTPDPNIPKTRPGELGSFRYGLQTLPETLASKLGDRVKLNWTIDRFYPTDHQTYIAEFSTPDGPQQVEARTLALMTPAHVSARLLQPLHSPIATALSQIPYPPVACVVLAYPKSALKQQLKGFGNLIPRHQGIRTLGTIWTSSLFPGRAPESWQVLSNYIGGATDPEIGEMDDDQIVAAVHQDLRQILLAEDVPPKVLAVHLWRRAIPQYTLGHQNRLNCIDAGLRSLPGLYLCSNYIDGVSVGDCVRRGQQWASKIQSHLHDCQTAN

SEQ ID NO: 81 - protein, 462 aa, Leptospirillum sp.
MAGFDCDTLVVGGGISGLAAALTLKNRGVDVRLLESRGYLGGAVRTVREEGYLLEFGPNSLMVRPDDAIDAVLGDPELRARIVAASGLSKNRYVVKSGNLYPVPLSPWAFIRTPLLSWRGRRDILSEWKVPPRTGGPEETLSHFVRRRLGEEALDYFVDPFVKGVYASHPDLLSVEAAFPLLVRLEREHGGLLRGALKTFLKRRKRPSGSAPRGIFSFTGGMGDLVEAMGKRLGEDVGTNVDVIKYTRLEEGFRVALMYDETEYYMTSRRLILATSAPQAAELLEGDPEGPSGELKAIPYAPVTIAYAGFLREQITHPLDGFGLLCPTAENRKVLGVIFSSSLFPGRAPDGKVLLTVFVGGMTGQKLAQTFDEDLERIVLRELTELLGVKGAPAFFRIHRWEKAIPQFILGHGETVRTIRKKLPSGLRLAGNYLDGISIARAFGSGVRAAEELLSEDGGTPG

SEQ ID NO: 82 - protein, 458 aa, Verrucomicrobiae sp.
MQDAIILGGGISGLTAGYLAQKQGQDISVIEKGKIPGGPISSFREEGYLVERGPNSLLLPDPWVETFIEELGLRDQLQETNPIASKRYIVKNGRPEAVPSSPLQAVFTPLFSLRGKFGFLLEPFRKKISDRAGSRETVASFVKRRMGLDFLDYAIDPFVSGVYAGDPNRLILEHAFPLMRGFERDSGSIIRGAIKHKKKQKREGTAYKKRSISFKDGLGILPQTIARKLGNRLWLGSEVVAVNRVEDHWQVTWKREGENFEGFAKNLLVCLPSHAIKRIAWSERIAAPLRSSPNLEYPAVHSLALGFRREQIAHALDGFGVLVPSKEPPTILGALFSSSLYEGRAPDGHCLLTVMLGGIRHPELAALPQDRLLELALRDLRALLGLKGDPSFYRCTSWPRAIPQYTRDFGPWRDTLKSLAEEFPGLHFGGNSVDGIAMGASILSGKRLAECLDKDIDV

SEQ ID NO: 83 - protein, 446 aa, Verrucomicrobia sp.
MNTKKVCILGAGLSGISLGLSHENKGNQVTIFEKDLRVGGVLQSIKSEGFLMDYGGNTLSIRTKKTVDFLKQYEILEHAMDANQESSKRFIIRKNRIISLPQGPLSFLFSSFLSPVGKLRLCLEPFIGRKKDNGSDETMAEFVERRLGREVLDYGVNPFIGGVYAARPESLILKYAFPSLHDTELTFGSIFWGMIRGGTQPSEKISKSRLISFREGMQELPNRLATRMHNPPVLGCEIKKIEFKDDVQWCVQGETRDGKIQKEVFDQVICTLPSHALDKIEWVGINSSHLLETLTRAYHPPLALAFQGYQQRQIKHPLDGFGFLVPEKERRKILGTLFSSTLFQNRAPENSVLLTTFIGGERNPELCDLPQNEILGHAFRENQDLLGIEGNPIFEHLKLWPKSIPIPDHTLEDRKKAASTLTLENKGLQILGAHINGAPLPNCMVL

SEQ ID NO: 84 - protein, 485 aa, Synechococcus sp.
MNPATPEPLNAEVVVIGAGISGLTLAWRLQQGLSARGGSPQAVLLAEASSRVGGCISTQSKDGYRWEEGPNSFTPTPALLNLIAEVGLTDQLVLADAKLPRYIYWEGALLPVPLSPAAALGSRLLSVGGKLRALQGLLGFVPPPPGHEETVRQFFRRQLGSEVAERLVEPFTSGVYAGDPDQLSAVAAFPRVAGLEERYGSLFAGALQALRQRPQPSPAAIQPPPKRGQLGNLRQGLQQLPEALAQKLGDSLRLGWRALQLKRAGELYWVGFETPEGSRWVAARQVVLALPAYEAAALLQELNPPASQLLAEILYPPVAVVALAYPQEALPQPLRGFGHLIPRSQGLRTLGTIWASCLFPERAPQGYHSFLSFLGGATDAALARRRGIPPIPALSPEERAQIAHAELSQVLLTRRAEPVYLGERLWPRAIPQYTLGHRQRIAQVQAHLASQTPGIWVCANYLDGVALGDCVRRAEALAQQLLSQV

SEQ ID NO: 85 - protein, 443 aa, Hymenobacter sp.
MTIAILGGGISGLVVAWQLQKAGVAYDLFEAETTPGGCLRSVSHPDGYLVETGPNSLQLSDELLELITELGLVDEIQDAAAVSKNRYVLRNGRYQQLPSTPPALLTNGFFSWKAKFNILRELRRPAAPLNPTETVDAFFRRRFGPEIVDYAVNPFISGIYAGDPAQLLIHKTFSKVAALEQQYGSVLRGLAKTGGGAGRRRIISLQGGIQKLTDTLAAKLTHHHVRQRVLALHRTTKGGYQVQTSAGSNGGFSYDAVVLALPTFAAAPLLAPLFPEAAAALAAVHYPPMAAVYTAYRREDVGHPLDGFGALHPKVEQPYAAGSIWTSSIFPNRVPDGQVLFTTFVGGAQYEANAQQSETAQKAAVHEELSRFYDIKAAQPLWQYRYLWDKAIPQYDQRIMAAHTTTDALQAQGIWSAANWRGGVGVPDCIRHARHVADQLTGK

SEQ ID NO: 86 - protein, 448 aa, Pontibacter sp.
MRVAIIGAGISGLSLAYYLQRQGVAYDLFEAGSEVGGNMRTLRKNGYTFELGPNTLQMNEELLQLITELKLETELLPLTPRNNKRYVLHDGKLYPVPASPKSFLANDLFSNEEKHRILQERKQPPAEVENETVSDFFERRFGVKQMDYLAAPMISGLYGGDPRQLLVNKAHPELKELETQYGSVLEGMVQKKKRGVFQRAFSFRNGMSTLPHAIADKLISLHLDHKVEFITRIKGKFIISCASNGDHDNEEYDKLVLALPAHQAAELIEFTYPGMSAALQNINYPPMAVVHTVYNRAEVGHPLQGFGALHPWEEQSFTSGSIWTSSLFEGRCRSHEVLITSYVGGTRFAEHAQLEERSLLEQVHQELCQTYQIKALAPVYQHLHLWQHALPQFDLYIEDAHHMAEVLEQDGLFISANWYAGVSVPDCVREAKAIAAKINTRAASRSIA

SEQ ID NO: 87 - protein, 463 aa, Leptospirillum sp.
MATEDVETLVIGGGIAGLACASHLKLAGRTVRLVERNDYLGGVIRTLSDSGYRIETGPNSLLVRTEEPLLKYLSRPEIAARIQLAGRMGKKRFILKDGHPVALPMSLSEGIFTQILSLPAKVRLLKEPFIPPAGGVDGVDPEKETVADFVRRRLGNEFLESLIDPFVKGVYASDPHLLSMADTFPRLVQMEKSYGSLIKGGLALARQKKAPAPAFAREILSFSEGMGTLPESLANILDDDAGTNAEVIGCAPSESGFRTALLFEEETYYIRSKHLVLALPAAQTAELIEPMAPGIPSLLGQIPYAPIAVVYLGYPRDRISHPLDGFGLLVPSRERRKILGALFSSSLFPGRSPDGHVLLTVFVGGMTQPKLAQAFDEDLLPMVTKEIGSMLGVLGAPSYVRIQRWAGAIPQSVPGHGERIRSIESALPSGLHLAGSYLSGVSVSQTFSSGIRAAEKILAQSPG

SEQ ID NO: 88 - protein, 451 aa, Prevotella sp.
MERQRKIIVIGAGLTGLTCAAHLRHKGQDVEVLEATERIGGLMQTEDFDGFIMEQGPSTGTIKYPEVAELFDMLGDKCTLEVAQSSAKCRLIWKDGHFCALPSGLWSAVTTPLFTLKDKFRILGEPWRRKGTDPNESVGALAERRLGRSFVDYAVDPFLSGVYAGDPYKLPTRLALPKLYNLEQHYGSFIKGAMALAKAPKSDRDKRATKEVFSTRGGFRSLVSALAKTIGDDRITTGCAHLHVEPLGDKWKLSWGENTIIADQVVTTCPAYSLPDLLTFLPKEQLDDLSNLYYAPVIEIGVGMKHTGNVHWNAFGGLVPSKEQQKVLGILMPSACFVGRSPEEGATYAFFIGGARHPEYLDKTDEELRELVNTSLHTMLGYPKGTQADAIRIYRHSHAIPQYMTETDSRLRAIDTVEHTYPSLHIIGNLKDGIGMGDRIKQAVDLAERIG

SEQ ID NO: 89 - protein, 436 aa, Flexithrix sp.
MVGIIGAGISGLSLAYHLQKLGKAYCLFEAGDKPGGNICSVKKEGFLLEKGPNSLLADSEIIDLVKELGLEDQMIIPETVSKKRYIFKNGKYQQLPSSPPGLIFNNFFSWHAKFSIYKELNNKSTSPQNETVADFFERRFCKEIVDQAVNPFISGIYAGDPEKLIMEKTFPAFLENEQKFGSVIRGFIKNKKNTQRKLTFSFKEGLGILADKLAENLSVNYNSPIKEIRQEAGGFLLITENGETKVTALVFSIPAYAAGKLIKDISPESAQAWEGVNYPPICVVHTAFRRKDLGFDFNGFGGLNPKKEDLFTAGSIWNSSLFENRSPKDQFLITSFVGGAQSLDNFQLTDEEIKAKVTDELQQNFKIKGSPTHQEITRWEKSIPQYDIDIFPAHQAIENLQREGIYVCSNWEGGVSVPDCIKKGKQLAERIKENKF

SEQ ID NO: 90 - protein, 469 aa, Geobacter sp.
MKKVIVVGGGISGLATAFELRNKGAEAGIELDVTLLEKEERVGGKIWSIKEEGYLCEWGPNGFLDSKPQTLDLCRDLGASERLLRSNDNARKRFIYTGGVLNRLPENGPTFLKSSLISWPGKLRLAMEPFISKRTDGTDETLASFGRRRLGEEALQKLISPMVSGIFAGDPETMSLRSCFPRIAELEDEYGSLIKAMIKLAKKKKQEAAQGKAVSSAAGPGGVLTSFRWGIQELTDILAEQLGSATVVTGQPVTGLTRGSSVPWRLKTPTVDIDADVVILASPAHATAGIVSGVDAAMAQVLGEIPYASMTVVCFGFERERIAYDLNGFGYLIPKDEGMNTLGTLWDSSIFENRAPEGKVLLRSMLGGACFPEYVKLSDAEVMQRVKADLKATMGITADPSFIRIFRHPQAIPQYTVGHGKRLAALQERSSALPGLFLTGNSYRGIGLNDCATAANRTTDEVVAYLKGR

SEQ ID NO: 91 - protein, 498 aa, Synechococcus sp.
MQAEVVVVGAGISGLTLALRLQQGLSPKDESTQPLLLAEASSRVGGCISTQSKDSYRWEEGPNSFTPVPALLNLIAEVGLAEHLVLADAKLPRYIYWEKELLPVPLSPSAAIGSRLLSVGGKLRALRGLLGFVAPPPGGEETVRQFFRRQLGSEVVERLVEPFTSGVYAGDPDQLSALAAFPRIAGLEERYGSLFAGAVQALRSRYRYATLPRTRHQDSANSPIQPPPKRGQLGNLRQGLQQLPEAIAQKLGSALRLGWRAVHLKRDETGYRVGFVIHDSGAEHTAPEEIHWVAAQQVVLTLPAYAAATLLQDLNPQASRLLREIPYPPVAVVALAYPEEALPQPLRGFGHLIPRSQGLRTLGTIWASSLFPERAPQGYHCLISFIGGATDAAFARQKGIPPITALSPDERAQIVHAELSQILLTRPVEPIRLGERLWPQAIPQYTLGHRQRIAQLQASLADQTPGVWVCANYLDGVALGDCVRRAEALAQQILSVRR

SEQ ID NO: 92 - protein, 475 aa, Crinalium sp.
MVDTLIIGAGISGLSLAYALHQDGRKVLLCERQERVGGNITTGKAGGFLWEEGPTSFTPTPALLKLAVDVGLREELVLADHRLPRFVYWKGQLLPVPMSPPSAVTSKLLSLSGKFRALVGALGFIPPAIGNHLSQQGGEETVAQFFKRHLGTEVAERLVAPFVSGVYAGDVHQLSARSAFRRIAQLENVGGGLVSGAILSRKQRQQQKPPTDPSLPTVRRGELGSFKEGLQSLPKAIASHLGENIKLNWTLTELRQTANQTYIAEFSTPEGSQQVEARTVVLTTPAYVTAELLHNLAPNASIALKEIPYPSVACVVLAYPDDALKFPLKGFGNLIPRGQGIRTLGTIWSSSLFPGRAPQGWQMLTNFIGGATDPEVGNLDNEQLVQAVHKDLQRVLLKKDVPPKAIAVHLWKRAIPQYTLGHHLRLAQINQDLAQLPGLYLCSNYTDGVSLGDCVQRAYDQLPIINKQLSIINDN

SEQ ID NO: 93 - protein, 486 aa, Planctomyces sp.
MNQSAPAKRIAVVGGGITGLSAAFHLQELAQEKNQPVEVTLFESQPEAGGWIGTISQDGYRIDTGADMFITNKPAAIELCQRLGLEDQLISTNQQYRGALILKDGTPVPVPLGFELMTPSRILPMLKTPLLSPIGKLRMGLEYFLPRRTSESGLDADDESLAQFVTRRFGREALTRLIQPLVAGIYTSDPEKLSLRATLPRFLDMERDHRSLIKAIRKQKKQTKSADATGARYGLFAAFKEGMQTLIRTLADRVSSTGTILYEHRVTHVAAADSGYDLTIESTVETQTQHFDAVLLTTAAPQAGQMLEAYAPVLSGLLKQIEYASTAIQVSVYRQENIKHPLHAFGLVIPAAEQRKIFAVAFASRKFPGRAPEGCVQLRTFVGGAMQPELLEHSDDELNAIVNQELADILGVSGEPIFSKLLRHNQSMPQYHLGHLQLVERIEQSAATLAGLELAGNAYRGVGIPDCIHSAEQAAERLLVDLTARV

SEQ ID NO: 94 - protein, 471 aa, Geobacter sp.
MKKAIVVGGGISGLASAYLLREKAKNSGMELEITIVEKEDRTGGKIRSIKEDGYLCEWGPNGFLDSKPQTLDLCRELKVDSQLLRSNDNARKRFIYSGGVLNRLPENGPSFLKSRLISWPGKLRLALEPTPFIAKAPEGVDETLAAFGRRRLGDEALRKLIAPMVSGIFAGDPETMSLVSCFPRIAELEREYGGLVKAMVKLAKKKKQEIAEGKQVASAAGPGGVLTSFRDGIQTLTDILNERLGKDMLVIGAEVTGVSRGNSTPYRVQTGGRELDADIVVLATPAYATAQALEGIDGGMSATLNQIPYATMTVVCFGYEQEKVAHDLNGFGYLIPKAEGMNILGTLWDSSIFENRAPEGKVLLRSMMGGACFPEYIRLSDAEVVQKVRDNLKTIMGIKEAPEFVRIFRHEKAIPQYTVGHGRRLAALEEQAKSHPGLFLSGNSYRGIGLNDCVAAANRTADEVVAFLQSR

SEQ ID NO: 95 - protein, 446 aa, Acidithiobacillus sp.
MEDVIIIGAGISGLATAYFLRKQGWSPLLLEAAAKPGGNLQSRQEEGYLRDMGPNSLMLKGHIVPEWLRELRLEEDIVEANPLAKRRYILNRHRQPVALGPGVLFGGGLLSWRGRLRLLGEPFRSPRRMQDSEESVADFVRRRLGEEALTWLVDPFISGVFAGNPARLSVQATLPRLIALEQDGGSLLRGALRARNKKSPDTPKTRLISFREGLQTLPLRVASALGDALRCNTPVEQLGNSDGSWQVSSGSQTWQSKRLILALPAGAAARLLAPTDAALAHELDAIPYPAVGSLSIGFQRMQVQHPLDGFGILIPRVMGLETLGILFSSTLFPGRAPADQVLLTAFIGGSQNDISGRDDDDLLATALREICPLLGISGKPVFSRCQTWPKAIPQYEIGHLDRIKRIDALSARHPGLYFRANWREGVALGDCMEEAYRFSQDVGWQR

SEQ ID NO: 96 - protein, 454 aa, Prevotella sp.
MEERKIVVVGAGLTGLTCAAYLRRKGQDVVVLEAADRIGGLMQTEEVDGFVMEQGPSTGTIKYPEVAELFDMLGDDCTLEVAQSSAKCRLIWKDGRFHALPSGLWSAITTPLFTLKDKFRILGEPWRKKGIDPNESVGSLAERRLGRSFVDYAVDPFLSGVYAGDPYQLPTRLALPKLYDLEQRYGSFIKGAMALAKQPKTDREKRATKAVFSTRGGFRSLVSALGRVIGDERIRTNCKELSIEPLGDKWKLSWGENTIIAEQVITTCPAYALPKLLNFLPKEQLDDLSNLYYAPVIEIGVGMKNTGDVHWNAFGGLVPSKEKQNVLGVLMPSACFQGRSPKEGANYACFIGGACHPEYINKTDEELIGLVNTSLHTMLGYPKGTCADVIRIYRHSHAIPQYMPETDARLRTIDAVELAYPGLHIIGNLKDGIGMGDRIKQAVDMAEKISLSVS

SEQ ID NO: 97 - protein, 458 aa, Thermovibrio sp.
MRVCVIGGGVSGLSTAFYLKRGGAQVKLLERENYPGGKARTYYEKGYIVESGPNGFLDGKPDTLELVKLLGAEKLLYRSSDKARKRFIYKNGRLVRLPENPIAFLSSYLLSWKGKVRVLGELLVPPSEKEDETLAEFVRRRLGKEALDYLLDPMVAGIFAGDPERMSLKAAFPTIYRLEREYGGLIRGLIAKAKEAKKKGAKSSGPAGPGGVLTSFVKGMSQFTQLLAQELGESFTPEAQVKTLEKKKDKWLVTYTLRGKEKSEEFDAVVLSLPAYAAAQVLKETSRELSELLASIEYSPISVVALGFEKRGLGHNLDGFGFLVPKVEGRKILGALWDSSVFPNRAPEGKALIRVMIGGARQPELALKSEEELTEIALKELKRIMKIRHYPEMVKVFRHEKGIPHYTIGHAEKVERIFKLGRELGNLFFCNNAYKGVGINDCTKSARETAEEVLNSLC

SEQ ID NO: 98 - protein, 536 aa, Brassica sp.
MDLSLLRPQPFLSPFSNPFPRSRPYKPLNLRCSVSGGSVVGSSTIEGGGGGKTVTADCVIVGGGISGLCIAQALVTKHPDAAKNVMVTEAKDRVGGNIITREEQGFLWEEGPNSFQPSDPMLTMVVDSGLKDDLVLGDPTAPRFVLWNGKLRPVPSKLTDLPFFDLMSIGGKIRAGFGAIGIRPSPPGREESVEEFVRRNLGDEVFERLIEPFCSGVYAGDPAKLSMKAAFGKVWKLEENGGSIIGGAFKAIQAKNKAPKTTRDPRLPKPKGQTVGSFRKGLTMLPEAISARLGDKVKVSWKLSSITKLASGEYSLTYETPEGIVTVQSKSVVMTVPSHVASSLLRPLSDSAAEALSKLYYPPVAAVSISYAKEAIRSECLIDGELKGFGQLHPRTQKVETLGTIYSSSLFPNRAPPGRVLLLNYIGGATNTGILSKSEGELVEAVDRDLRKMLIKPSSTDPLVLGVKVWPQAIPQFLIGHIDLVDAAKASLSSSGHEGLFLGGNYVAGVALGRCVEGAYETATQVNDFMSRYAYK

SEQ ID NO: 99 - protein, 521 aa, Brassica sp.
MASNAVADHDKPVSGKRVAVVGAGVSGLAAAYKLKSKGVNVTVFEADGRVGGKLRSVMHNGLIWDEGANTMTEAEPEVGSLLDDLGLREKQQFVSTFHALSIMFQPLSQKKRYIVRNGLPVMIPTNPIALVTSSVLSTQSKFQILLEPFLWKKNDSSSKVSDASVVESVSGFFQRHFGQEVVDYLIDPFMGGTSAADPESLSMKHSFPDLWNIEKSFGSIIVGAIRSKFAAKGSKNGETKSSTGTKKGSRGSFSFKGGMQILPDMLCKDLSREDLNLDSKVLSLSYNTGPREENWSLSCVSHNETQRQNLHYDAVVMTAPLCNVKEMKVMKGGEPFKLNFLPEIKYMPLSVIITTFTKEKVKRPLEGFGVLIPSIEQKHGFKTLGTLFSSMMFPDRCPSDLHLYTTFIGGSRNQELAKASTDELKQVVTSDLQRLLGIEGEPVFVNHVYWNKAFPLYDRSYDSVMEAIDKMEKDLPGFFYAGNHRGGLSVGKSIASGCKAADLVISYLESCSNDNKPEDSL

SEQ ID NO: 100 - protein, 539 aa, Gossypium sp.
MTALIDLSLLRSSPSVSPFSIPHHQHPPRFRKPFKLRCSLAEGPTISSSKIDGGESSIADCVIVGGGISGLCIAQALATKHRDVASNVIVTEARDRVGGNITTVERDGYLWEEGPNSFQPSDPILTMAVDSGLKDDLVLGDPNAPRFVLWEGKLRPVPSKPTDLPFFDLMSIAGKLRAGFGAIGIRPPPPGYEESVEEFVRRNLGAEVFERFIEPFCSGVYAGDPSKLSMKAAFGRVWKLEEIGGSIIGGTFKTIQERNKTPKPPRDPRLPKPKGQTVGSFRKGLTMLPEAIANSLGSNVKLSWKLSSITKLGNGGYNLQFETPEGMVSLQSRSVVMTIPSHVASNLLHPLSAAAADALSQFYYPPVASVTVSYPKEAIRKECLIDGELKGFGQLHPRSQGIETLGTIYSSSLFPNRAPSGRVLLLNYIGGATNTGILSKTEGELVEAVDRDLRKMLINPNAKDPLVLGVRVWPKAIPQFLVGHLDLLDSAKMALRDSGFHGLFLGGNYVSGVALGRCVEGAYEVAAEVKEFLSQYAYK

SEQ ID NO: 101 - protein, 503 aa, Gossypium sp.
MASTENKDDHSSAKRVAVIGAGVSGLAAAYKLKSQGLHVTVFESEGRAGGKLRSVSREGLIWDEGANTMTESEIEVRSLFDDLGIQDKEQVPIAQNKRYIVRNGVPVLIPSNPLALFTSSILSAKSKFQIILEPFLWRKSEASKVSDAYNQESVGGFFQRHFGQEVVDYLVDPFVAGTSAGDPESLSMCHSFPELWDLEQRFGSIIVGAVKSKFSAKRTNREETKNSVKRKALRGSFSFQGGMQTLADMLCKDLSKDELKLKSKVLSLSYSHEGKSTSENWSLSYASDRDKRSQGSSFDAVIMTAPVCNVKEMKITKGGNVFPLNFIPEVSYMPLSVIITAFKKENVKKPLEGFGVLIPSKEQQNGLKTLGTLFSSVMFPDRAPNNLYLYTTFVGGNRNKELAKASTDELKHIVTSDLQQLLGVEGEPTFFNHFYWSKAFPLYGRNYASVLEAIEKIERDLPGFFYAGNHKGGLSVGKSIASGCKAADNVITYLESSHDKLLK

SEQ ID NO: 102 - protein, 535 aa, Conyza sp.
MTSLTNFTPLKLTNPNYLTTTTTYNHRKLSNFRFRCSIARDSPTAPSISGDSSSRPLLDCVVVGAGISGLCIAQALSTKHGGDVVVTEARERVGGNISTVERDGYLWEEGPNSFQPSDPMLTMVVDSGLKDDLVLGDPTAPRFVLWDGDLKPVPSSPSDLPTFDLMSLGGKLRAGFGALGIRPPPPDREESVEEFVRRNLGDEVFERLIEPFCSGVYAGDPSKLSMKAAFGKVWKLEQNGGSIVGGAFKAIQAKNKSTKPPRDPRLPTPKGQTVGSFRKGQAMLPNAISKGLGSRVKLSWELVGITKSENRGYSLTYRTPDGLESLQTKTVVMTVPSYVASDLLRPLSVEAADALSKFYYPPVAAVSVSYPKEAIRADRLIDGQLKGFGQLHPRSQGVETLGTIYSSSLFPNRAPPGRVLLLNYIGGATNPGILSKTESQIVEAVDRDLRKMLINPKAGEPLTLGVKVWPRAIPQFLIGHYDILEAAKCALSLAGYRGMFLGGNYVSGVALGRCVENAYEVAADVSNFLSRGVYK

SEQ ID NO: 103 - protein, 498 aa, Conyza sp.
MASPTTTTDDNKEKAPAKRVAVVGAGVSGLAAAYKLKLHGINVTVFEAGEIAGGKLRSISQNGLIWDEGANTMTESEPDVSRLLDDLGLRDKQQSPLSQHKRYIVRNGKPVLVPSNPIALIQSSLLSTQSKLQILLEPFSWKKKNSSDTQESVGAFFQRHFGKEVVEYLINPVVAGTSGGDPESLSMRYSFPELWDLERRFGSLISGAFQSMISSRGRKKSPSGSSKRRRGSFSFLGGMQTLTNALSKEVGQHELNLQSKVLEMSYSCDDNTTGNWSIYCAPDQNKQLNQQPFDAVIMTAPLGNVKEMKITKTGSPFLLNFIPELSYMPVSVIISTFKKENVKRPLEGFGMLVPAKEQENGLKTLGTLFSSMMFPDRAPEDLYLYTTFVGGSRNKELANASRDELKQIVTSDLRQLLGAEGEPQFLTHYYWSKAYPLYGRDYGLVMEAIEKMERELPGYFYAGNHKGGLAVGKAISSGCKAAESVISYLDSYSDEKRC

SEQ ID NO: 104 - protein, 565 aa, Kochia sp.
MSAMASPSIIPQSFLQRSPTSLQSRSNYSKNHIIISISTPCSHGKNQRRFLRKTTHFRSIHCSTISTSTPTSSSNPGTLGEGGLLDCVIVGGGISGLCIAQALSTKYSSLSTNFIVTEAKDRVGGNITTKEDDGYIWEEGPNSFQPSDAVLTMAVDCGLKDELVFGDPKAPRFVLWNGKLRRVPSKLTDLPFFDLMSFPGKIRAGLGALGFRPSPPGREESVEDFVRRNLGDEVFERLIEPFCSGVYAGDPAKLSMKAAFGRVWVLEQMGGNIIGGALKTIQEKKNKPKPPRDPRLPKPKGQTVGSFRKGLIMLPNAISARLGSKVKLSWTLASISKTHNGEYNLIYDTPDGPVSVRTKSIVMTIPSYVASSLLRPFSDAAADSLSKFHYPPVAAVSLSYPEEAIRPECLIDGKLQGFGQLHPRSQGVETLGSIYSSSLFPGRAPPGRTMILSFIGGATNPGIVDKTQDELAKTVDKDLRRILINPSAKDPRVLGVKVWPQAIPQFLIGHFDLLDAAKAALTDAGCKGLFLGGNYVSGVALGRCIEGAYESAAEVVDFLSQYSDK

SEQ ID NO: 105 - protein, 531 aa, Lolium sp.
MVGATMATATVTAALPLRLRVPARSRRGQTRCAVASDATEAPAVPSARLSADCVIVGGGISGLCTAQALATKYGVTDLLVTEARARAGGNITTVERPDEGYLWEEGPNSFQPSDPVLTMAVDSGLKDDLVFGDPNAPRFVLWQGKLRPVPSKPGDLPFFDLMSIPGKLRAGLGALGIRPPPPGREESVEEFVRRNLGAEVFERLIEPFCSGVYAGDPSKLSMRAAFGKVWRLEENGGSIIGGTIKAIQDRGKNPKPPRDPRLPTPKGQTVASFRKGLAMLPNAIASRLGSKVKLSWKLTGITKSDNQGYVLAYETPEGVVSVQAKSVIMTIPSYIASEILRPLSSDAADGLSKFYYPPVAAVTVSYPTEAIRKECLIDGELQGFGQLHPRSQGVETLGTIYSSSLFPNRAPAGRVLLLNYIGGATNTGIVSKTESDLVEAVDRDLRKMLINPTAPDPLALGVRVWPQAIPQFLIGHLDRLDAAKSALARGGCSGLFLGGNYVAGVALGRCIEGAYESASEVSDFLTKYAYK

SEQ ID NO: 106 - protein, 509 aa, Lolium sp.
MAASDDPRAAPARSVAVVGAGVSGLVAAYRLRKSGVRVTVFEADDRAGGKIRTNSDGGFLWDEGANTMTESALEASRLIDDLGLEGRLQYPNSQHKRYTVKDGAPALIPSDPIALMKSSLLSTKSKFKLFLEPFLYEKSSTNNSKKVSDEHIRESVGSFFERHFGKEVVDYLIDPFVAGTSAGDPESLSIRHAFPALWNLEKKYGSIIAGAILSKLTAKGDSTKKGSAVSGKGRNKRVSFSFHGGMQTLVDALHKEIGDGNVKLATQVLSLACSCDGLSASNGWSIFVDSKDASNRELAKNQPFDAVIMTAPLSNVQRMKFTKGGAPFVLDFLPKVDYLPLSLMVTAFKKEDVKRPLEGFGVLVPYKEQQKHGLKTLGTLFSSMMFPDRAPNDQHLFTTFVGGSHNRDLAGAPTAILKQLVTSDLRKLLGVEGQPTFVRHIHWKNAFPLYGHDYDSALEAIGKMESDLPGFFYAGNNKDGLAVGNVIASGSKTADLVISYLELGIKRDN

SEQ ID NO: 107 - protein, 539 aa, Gossypium hirsutum
MTALIDLSLLRSSPSVSPFSIPHHQLPPRSRKPFKLRCSLAEGPTISSSKIDGGESSIADCVVVGGGISGLCIAQALATKHRDVASNVIVTEARDRVGGNITTVERDGYLWEEGPNSFQPSDPILTMAVDSGLKDDLVLGDPNAPRFVLWEGKLRPVPSKPTDLPFFDLMSIAGKLRAGFGAIGIRPPPPGYEESVEEFVRRNLGAEVFERFIEPFCSGVYAGDPSKLSMKAAFGRVWKLEEIGGSIIGGTFKTIQERNKTPKPPRDPRLPKPKGQTVGSFRKGLTMLPEAIANSLGSNVKLSWKLSSITKLGNGGYNLTFETPEGMVSLQSRSVVMTIPSHVASNLLHPLSAAAADALSQFYYPPVASVTVSYPKEAIRKECLIDGELKGFGQLHPRSQGIETLGTIYSSSLFPNRAPSGRVLLLNYIGGATNTGILSKTEGELVEAVDRDLRKMLINPNAKDPLVLGVRVWPKAIPQFLVGHLDLLDTAKMALRDSGFHGLFLGGNYVSGVALGRCVEGAYEVAAEVKEFLSQYAYK

SEQ ID NO: 108 - protein, 560 aa, Beta vulgaris
MKSMALSNCIPQTQCMPLHSSGHYRGNCIMLSIPCSLIGRRGYYSHKKRRMSMSCSTSSGSKSAVKEAGSGSGSGAGGLLDCVIVGGGISGLCIAQALCTKQSSLSPNFIVTEAKDRVGGNIVTVEADGYIWEEGPNSFQPSDAVLTMAVDSGLKDELVLGDPNAPRFVLWNDKLRPVPSSLTDLPFFDLMTIPGKIRAALGALGFRPSPPPHEESVEHFVRRNLGDEVFERLIEPFCSGVYAGDPAKLSMKAAFGKVWKLEQKGGSIIGGTLKAIQERGSNPKPPRDQRLPKPKGQTVGSFRKGLVMLPTAISARLGSRVKLSWTLSSIVKSLNGEYSLTYDTPDGLVSVRTKSVVMTVPSYVASRLLRPLSDSAADSLSKFYYPPVAAVSLSYPKEAIRSECLINGELQGFGQLHPRSQGVETLGTIYSSSLFPGRAPPGRILILSYIGGAKNPGILNKSKDELAETVDKDLRRMLINPDAKLPRVLGVRVWPQAIPQFSIGHFDLLDAAKAALTDTGVKGLFLGGNYVSGVALGRCIEGAYESAAEVVDFLSQYSDK

SEQ ID NO: 109 - protein, 530 aa, Hordeum vulgare
MAGAGATMATATAPPLRGRVTRRPHGVRPRCAAAGSATETPAAPGVRLSADCVIVGAGISGLCTAQALATRHGVGDLLVTEARDRPGGNITTVERPDEGYLWEEGPNSFQPSDPVLTMAVDSGLKDDLVFGDPNAPRFVLWEGKLRPVPSKPGDLPFFSLMSVPGKLRAGLGALGIRPPPPGREESVEEFVRRNLGAEVFERLIEPFCSGVYAGDPSKLSMKAAFGKVWRLEEIGGSIIGGTIKAIQDKGKNPKPPRDPRLPAPKGQTVASFRKGLAMLPNAIASRLGSKVKLSWKLTSITKADNQGYVLGYETPEGLVSVQAKSVIMTIPSYVASDILRPLSIDAADALSKFYYPPVAAVTVSYPKEAIRKECLIDGELQGFGQLHPRSQGVETLGTIYSSSLFPNRAPAGRVLLLNYIGGSTNTGIVSKTESDLVEAVDRDLRKMLINPRAADPLALGVRVWPQAIPQFLIGHLDRLAAAKSALGRGGYDGLFLGGNYVAGVALGRCIEGAYESASQVSDFLTKYAYK

SEQ ID NO: 110 - protein, 554 aa, Hordeum vulgare
MLTSATAPPSSSSCSSHAPARFASPSRPRRSASASARGRGRRVRPVLAMAASDDPRARSVAVVGAGVSGLVAAYMLRKSGVRVTVFEAEDRAGGKIRTNSDGGFLWDEGANTMTESALEASRLIDDLGLQDRLQYPNSQHKRYTVKDGAPALIPSDPIALMKSTVLSTKSKFKLFLEPFLYEKSSTRNSKKVSDEHLRESVGSFFERHFGKEVVDYLIDPFVAGTSAGDPESLSIRHAFPGLWNLEKKYGSLIVGAILSKLTAKGGSAKKGGASSGKGRNKRASFSFHGGMQTLVDALHKEVGDTNVKLGTQVLSLACNCDGLSASDGWSIFVDSKDASSKELARNQSFDAVIMTAPLSNVQRMKFTKGGRPFVLDFLPKVDYLPLSLMVTAFKKEDVKRPLEGFGVLIPFKEQQKHGLKTLGTLFSSMMFPDRAPNDQHLFTTFIGGSHNRDLAGAPTAILKQFVTSDLTKLLGVEGQPTFVKHIHWRNAFPLYGHDYDLALEAIGKMEGDLPGFFYAGNNKDGLAVGNVIASGSNTADLVISYLESGIKHVN

SEQ ID NO: 111 - protein, 531 aa, Triticum aestivum
MAGATMATATVAAASPLRGRVTGRPHRVRPRCATASSATETPAAPGVRLSAECVIVGAGISGLCTAQALATRYGVSDLLVTEARDRPGGNITTVERPDEGYLWEEGPNSFQPSDPVLTMAVDSGLKDDLVFGDPNAPRFVLWEGKLRPVPSKPGDLPFFSLMSIPGKLRAGLGALGIRPPPPGREESVEEFVRRNLGAEVFERLIEPFCSGVYAGDPSKLSMKAAFGKVWRLEEIGGSIIGGTIKAIQDKGKNPKPPRDPRLPAPKGQTVASFRKGLAMLPNAIASRLGSKVKLSWKLTSITKADNQGYVLGYETPEGLVSVQAKSVIMTIPSYVASDILRPLSIDAADALSKFYYPPVAAVTVSYPKEAIRKECLIDGELQGFGQLHPRSQGVETLGTIYSSSLFPNRAPAGRVLLLNYIGGSTNTGIVSKTESDLVGAVDRDLRKMLINPRAADPLALGVRVWPQAIPQFLIGHLDRLAAAKSALGQGGYDGLFLGGNYVAGVALGRCIEGAYESASQVSDFLTKYAYK

SEQ ID NO: 112 - protein, 501 aa, Solanum lycopersicum; identical to SEQ ID NO: 21

SEQ ID NO: 113 - protein, 546 aa, Triticum aestivum
MGIHPAALTFPRATEMAGATMATATVAAASPLRGRVTGRPHRVRPRCATASSATETPAAPGVRLSAECVIVGAGISGLCTAQALATRYGVSDLLVTEARDRPGGNITTVERPDEGYLWEEGPNSFQPSDPVLTMAVDSGLKDDLVFGDPNAPRFVLWEGKLRPVPSKPGDLPFFSLMSIPGKLRAGLGALGIRPPPPGREESVEEFVRRNLGAEVFERLIEPFCSGVYAGDPSKLSMKAAFGKVWRLEEIGGSIIGGTIKAIQDKGKNPKPPRDPRLPAPKGQTVASFRKGLAMLPNAIASRLGSKVKLSWKLTSITKADNQGYVLGYETPEGLVSVQAKSVIMTIPSYVASDILRPLSIDAADALSKFYYPPVAAVTVSYPKEAIRKECLIDGELQGFGQLHPRSQGVETLGTIYSSSLFPNRAPAGRVLLLNYIGGSTNTGIVSKTESDLVGAVDRDLRKMLINPRAADPLALGVRVWPQAIPQFLIGHLDRLAAAKSALGQGGYDGLFLGGNYVAGVALGRCIEGAYESASQVSDFLTKYAYK

SEQ ID NO: 114 - protein, 539 aa, Gossypium hirsutum
  VARIANT 137: note = X can be any naturally occurring amino acid
  VARIANT 156: note = X can be any naturally occurring amino acid
  VARIANT 168: note = X can be any naturally occurring amino acid
MTALIDLSLLRSSPSVSPFSIPHHQLPPRSRKPFRLRCSVAEGPTISSSKIDGGESSIADCVVVGGGISGLCIAQALATKHRDVASNVIVTEARDRVGGNITTVERDGYLWEEGPNSFQPSDPILTMAVDSGLKDDXVLGDPNAPRFVLWEGKLRXVPSKPTDLPFFXLMSIAGKLRAGFGAIGIRPPPPGYEESVEEFVRRNLGAEVFERFIEPFCSGVYAGDPSKLSMKAAFGRVWKLEEIGGSIIGGTFKTIQERNKTPKPPRDPRLPKPKGQTVGSFRKGLTMLPEAIANSLGSNVKLSWKLSSITKLGNGGYNLTFETPEGMVSLQSRSVVMTIPSHVASNLLHPLSAAAADALSQFYYPPVASVTVSYPKEAIRKECLIDGELKGFGQLHPRSQGIETLGTIYSSSLFPNRAPSGRVLLLNYIGGATNTGILSKTEGELVEAVDRDLRKMLINPNAKDPLVLGVRVWPKAIPQFLVGHLDLLDSAKMALRDSGFHGLFLGGNYVSGVALGRCVEGAYEVAAEVKEFLSQYAYK

SEQ ID NO: 115 - protein, 503 aa, Gossypium hirsutum
MASTENKDDHSSAKRVAVIGAGVSGLAAAYKLKSQGLHVTVFESEGRAGGKLRSVSRDGLIWDEGANTMTESEIEVRSLFDDLGIQDKQQVPIAQNKRYIMRNGVPVLIPSNPLSLFTSSILSAKSKFQIILEPFLWRNSEASKVSDAYNQESVGGFFQRHFGQEVVDYLVDPFVAGTSAGDPESLSMCHSFPGLWDLEQRFGSIIVGAVKSKFSAKRTNREETKNSVKRKALRGSFSFKGGMQTLADMLCKDLSKDELKLKSKVLSLSYSHEGKSTSENWSLSYASDRDKRSQGSSFDAVIMTAPVCNVKEMKITKGGNVFPLNFIPEVSYMPLSVIITAFKKENVKKPLEGFGVLIPSKEQQNGLKTLGTLFSSVMFPDRAPNNLYLYTTFVGGNRNEKLAKASTDELKHIVTSDLQQLLGVEGEPTFFNHFYWSKAFPLYGRNYASVLEGIEKMERDLPGFFYAGNHKGGLSVGKSIASGCKAADNVITYLESSHDKLLK

SEQ ID NO: 116 - protein, 560 aa, Beta vulgaris
MKSMALSNCIPQTQCMPLHSSGHYRGNCIMLSIPCSLIGRRGYYSHKKRRMSMSCSTSSGSKSAVKEAGSGSGSGAGGLLDCVIVGGGISGLCIAQALCTKQSSLSPNFIVTEAKDRVGGNIVTVEADGYIWEEGPNSFQPSDAVLTMAVDSGLKDELVLGDPNAPRFVLWNDKLRPVPSSLTNLPFFDLMTIPGKIRAALGALGFRPSPPPHEESVEHFVRRNLGDEVFERLIEPFCSGVYAGDPAKLSMKAAFGKVWKLEQKGGSIIGGTLKAIQERGSNPKPPRDQRLPKPKGQTVGSFRKGLVMLPTAISARLGSRVKLSWTLSSIVKSLNGEYSLTYDTPDGLVSVRTKSVVMTVPSYVASRLLRPLSDSAADSLSKFYYPPVAAVSLSYPKEAIRSECLINGELQGFGQLHPRSQGVETLGTIYSSSLFPGRAPPGRILILSYIGGAKNPGILNKSKDELAETVDKDLRRMLINPDAKLPRVLGVRVWPQAIPQFSIGHFDLLDAAKAALTDTGVKGLFLGGNYVSGVALGRCIEGAYESAAEVVDFLSQYSDK

SEQ ID NO: 117 - protein, 508 aa, Brassica napus
MASNAVADHDKLSGKRVAVVGAGVSGLAAAYKLKSKGVNVTVFEADGRVGGKLRSVMHNGLIWDEGANTMTEAEPEVGSLLDDLGLREKQQFPLSQKKRYIVRNGLPVMIPTNPIALVTSSVLSTQSKFQILLEPFLWKKNDSSSKVSDASVVESVSGFFQRHFGQEVVDYLIDPFMGGTSAADPESLSMKHSFPDLWNIEKSFGSIIVGAIRSKFAAKGSKNGETKSSTGTKKGSRGSFSFKGGMQILPEMLCKDLSRDELNLDSKVLSLSYNAGPRQENWSLSCVSHNEAQGQNLHYDAVIMTAPLCNVKEMKVMKGGEPFKLNFLPEIKYMPLSVIITTFTKEKVKRPLEGFGVLIPTKEQKHGFKTLGTLFSSMMFPDRCPSDLHLYTTFIGGSRNQELAKASTDELKQVATSDLQRLLGVEGEPVFVNHVYWNKAFPLYDRSYDSVMEAIDKMEKDLPGFFYAGNHRGGLSVGKSIASGCKAADLVISYLESCSNDKKSEDSL

SEQ ID NO: 118 - DNA, 1638 bp, Triticum aestivum
  source 1..1638: mol_type = unassigned DNA
atggggatccaccccgccgcactgacattcccccgagcgacagaaatggccggcgcaacaatggccaccgccaccgtcgcggccgcgtcgccgctccgcggcagggtcaccgggcgcccacaccgcgtccgcccgcgttgcgctaccgcgagcagcgcgaccgagactccggcggcgcccggcgtgcggctgtccgcggaatgcgtcattgtgggcgccggcatcagcggcctctgcaccgcgcaggcgctggccacccgatacggcgtcagcgacctgctcgtcacggaggcccgcgaccgcccgggcggcaacatcaccaccgtcgagcgtcccgacgaggggtacctgtgggaggagggacccaacagcttccagccctccgacccggtcctcaccatggccgtggacagcgggctcaaggatgacttggtgttcggggaccccaacgcgccccggttcgtgctgtgggaggggaagctgaggccggtgccgtcgaagccaggcgacctgcctttcttcagcctcatgagtatccctgggaagctcagggccggccttggcgcgctcggcattcgcccacctcctccagggcgcgaggagtcggtggaggagtttgtgcgccgcaacctcggtgccgaggtctttgagcgcctcatcgagcctttctgctcaggtgtatatgctggtgatccttcgaagcttagtatgaaggctgcatttgggaaggtctggaggttggaggagattggaggtagtattattggtggaaccatcaaggcgattcaggataaagggaagaaccccaaaccgccaagggatccccgacttccggcaccaaagggacagacggtggcatctttcaggaagggtctagccatgctcccgaatgccatcgcatctaggctgggtagtaaagtcaagctgtcatggaagcttacgagcattacaaaggcggacaaccaaggatatgtattaggttatgaaacaccagaaggacttgtttcagtgcaggctaaaagtgttatcatgaccatcccgtcatatgttgctagtgatatcttgcgcccactttcaattgatgcagcagatgcactctcaaaattctattatccgccagttgctgctgtaactgtttcatatccaaaagaagctattagaaaagaatgcttaattgatggggagctccagggtttcggccagttgcatccacgtagccaaggagtcgagactttagggacaatatatagctcttctctctttcctaatcgtgctcctgctggaagagtgttacttctgaactatatcgggggttctacaaatacagggatcgtctccaagactgagagtgacttagtaggagccgttgaccgtgacctcagaaaaatgttgataaaccctagagcagcagaccctttagcattaggggttcgagtgtggccacaagcaataccacagtttttgattgggcaccttgatcgccttgctgctgcaaaatctgcactgggccaaggcggctacgacgggmtgttcctaggaggaaactacgtmgcaggagttgccttgggccgatgcatcgagggtgcgtacgagagtgcctcacaagtatctgacttcttgaccaagtatgcctacaag

SEQ ID NO: 119 - DNA, 1617 bp, Gossypium hirsutum
  source 1..1617: mol_type = unassigned DNA
  variation 411: note = n is a, c, g, or t
  variation 447: note = n is a, c, g, or t
  variation 467: note = n is a, c, g, or t
  variation 504: note = n is a, c, g, or t
  variation 564: note = n is a, c, g, or t
  variation 918: note = n is a, c, g, or t
  variation 939: note = n is a, c, g, or t
  variation 1008: note = n is a, c, g, or t
atgacggctctaatcgacctttctcttctccgctcctcgccctccgtttcccctttctccataccccaccaccagcttccgccccgctctcgtaaacctttcaggctccgatgctccgtcgccgagggtcccacgatttcctcatctaaaatcgacgggggagaatcatccatcgcggattgcgtcgtcgttggaggtggtatcagtggactttgcattgctcaagctctcgccaccaagcaccgtgacgtcgcttccaatgtgattgtgacggaagccagagaccgtgttggtggcaacatcactaccgttgagagagatggatatctgtgggaagaaggccccaacagttttcagccctccgatcctattctaaccatggccgtggatagtggattgaaggacgatttngttttaggtgaccctaatgcaccgcgatttgtactntgggagggaaaactaaggcntgtgccctccaagccaaccgacttgccgttttttganttgatgagcattgctggaaaacttagggctgggttcggggctattggcattcggcctccncctccgggttatgaagaatcggtggaggagtttgtgcgccgtaatcttggtgctgaggtttttgaacgctttattgaaccattttgttcaggtgtttatgcaggggatccttcaaaattaagcatgaaagcagcatttggaagagtatggaagctagaagagattggtggcagcatcattggtggcactttcaagacaatccaggagagaaataagacacctaagccacccagagacccgcgtctgccaaaaccgaagggccaaacagttggatcttttaggaagggacttaccatgctgcctgaggcaattgctaacagtttgggtagcaatgtaaaattatcttggaagctntccagtattaccaaattgggnaatggagggtataacttgacatttgaaacacctgaaggaatggtatctcttcagagtagaagtgttgtnatgaccattccatcccatgttgccagtaacttgttgcatcctctctcggctgctgctgcagatgcattatcccaattttattatcctccagttgcatcagtcacagtctcctatccaaaagaagccattcgaaaagaatgtttgattgatggtgaacttaaggggtttggccagttgcacccacgcagccaaggaattgaaactttagggacgatatacagttcatcacttttccccaatcgagctccatctggcagggtgttgctcttgaactacataggaggagctaccaacactggaattttgtccaagactgaaggggaacttgtagaagcagttgatcgtgatttgagaaaaatgcttataaatcctaatgcaaaggatcctcttgttttgggtgtaagagtatggccaaaagccattccacagttcttggttggtcatttggatctccttgatagtgcaaaaatggctctcagggattctgggtttcatggactgtttcttgggggcaactatgtatctggtgtggcattaggacggtgtgtggaaggtgcttacgaggttgcagctgaagtgaaggaattcctgtcacaatatgcatacaaa

SEQ ID NO: 120 - DNA, 1509 bp, Gossypium hirsutum
  source 1..1509: mol_type = unassigned DNA
  variation 630: note = n is a, c, g, or t
atggcgtcaactgaaaacaaagatgaccactcttctgctaaaagagtagctgtcattggcgctggtgttagtggactcgcggcagcttacaagttgaaatcacaaggtttacatgttacggtatttgaatctgaaggaagagctggagggaagttaagaagtgtttcgagggatggtttgatatgggatgaaggagcaaatacaatgactgaaagtgagattgaagtgagaagtttgtttgatgatcttggtattcaagataagcaacaagttccaattgcacagaacaagcggtatatcatgagaaatggcgtgcctgtattgatcccctcaaatcctctctcattattcacaagcagcattctttcagcaaaatcgaagtttcagattattttggagccttttctgtggagaaacagtgaagcctcaaaagtatctgatgcttataatcaggaaagtgtgggaggattttttcagcgccattttgggcaggaggttgtggattaccttgttgatccctttgttgctggcacaagtgctggagatcctgaatctctatctatgtgccattcctttccggggctatgggatcttgagcaaaggtttggctctatcattgttggagcagtnaaatctaaattctctgccaaaaggacaaatcgtgaagaaacaaaaaattcagtgaaaagaaaggctctacgtggctcattttccttcaagggtggaatgcagacacttgctgatatgttgtgcaaagatctttccaaagatgagcttaaactgaaatcaaaggttttgtcattatcttacagtcatgaggggaagtctacatcagagaactggtctctctcttatgcttctgatcgagacaagcgctcacaaggctcatcatttgatgctgtaataatgacggctccggtgtgcaatgttaaagaaatgaaaattactaaaggaggaaatgtctttccactgaacttcatccctgaggtgagttatatgccactatccgtcataattactgcttttaagaaggagaatgtcaagaaacccctagaaggttttggagttcttataccttcaaaggagcagcaaaatggtttaaaaactctcggtacacttttttcatctgtgatgtttcctgatcgtgcacctaataatttgtatctctatacaacctttgttggaggaaatcgaaatgagaagctggcaaaagcctcaacagatgaattgaagcatattgttacttccgaccttcagcagttgttgggagtggagggagaaccgacattcttcaatcatttctattggagcaaggcatttcccttgtatggccgtaactatgcttcggtcttggaaggcattgaaaagatggagagagatctccctggattcttctatgcaggtaaccacaaagggggattatcggtgggcaaatcgattgcttctggttgcaaagcagcagataatgtaattacatatttggaatcttcacatgacaagctgctgaaa

SEQ ID NO: 121 - DNA, 1680 bp, Beta vulgaris
  source 1..1680: mol_type = unassigned DNA
atgaaatcaatggcgttatcaaactgcattccacagacacagtgcatgccattgcacagcagcgggcattacaggggcaattgtatcatgttgtcaattccatgtagtttaattggaagacgaggttattattcacataagaagaggaggatgagcatgagttgcagcacaagctcaggctcaaagtcagcggttaaagaagcaggatcaggatcaggatcaggagcaggaggattgctagactgcgtaatcgttggaggtggaattagcgggctttgcatcgcgcaggctctttgtacaaaacagtcctctttatccccaaattttatagtgacagaggccaaagacagagttggcggcaacatcgtcactgtggaggccgatggctatatctgggaggagggacccaatagcttccagccttccgacgcggtgctcaccatggcggtcgacagtggcttgaaagatgagttggtgctcggagatcccaatgctcctcgctttgtgctgtggaatgacaaattaaggcccgtaccttccagtctcaccaacctccctttcttcgacctcatgaccattcccggcaagattagggctgctcttggtgctctcggatttcgcccttctcctccacctcatgaggaatctgttgaacactttgtgcgtcgtaatctcggagatgaggtctttgaacgcttgattgaacccttttgttcaggtgtgtatgccggtgatcctgccaagctgagtatgaaagctgcttttgggaaggtctggaagttggagcaaaagggtggcagcataattggtggcactctcaaagctatacaggaaagagggagtaatcctaagccgccccgtgaccagcgcctccctaaaccaaagggtcagactgttggatcctttagaaagggactcgttatgttgcctaccgccatttctgctcgacttggcagtagagtgaaactatcttggaccctttctagtatcgtaaagtcactcaatggagaatatagtctgacttatgataccccagatggcttggtttctgtaagaaccaaaagtgttgtgatgactgtcccatcatatgttgcaagtaggcttcttcgtccactttcagactctgctgcagattctctttcaaaattttactatccaccagttgcagcagtgtcactttcctatcctaaagaagcgatcagatcagaatgcttgattaatggtgaacttcaaggtttcgggcaactacatccccgcagtcagggtgtggaaaccttgggaacaatttatagttcgtctcttttccctggtcgagcaccacctggtaggatcttgatcttgagctacatcggaggtgctaaaaatcctggcatattaaacaagtcgaaagatgaacttgccgagacagttgacaaggacctgagaagaatgcttataaatcctgatgcaaaacttcctcgtgtactgggtgtgagagtatggcctcaagcaataccccagttttctattgggcactttgatctgctcgatgctgcaaaagctgctctgacagatacaggggtcaaaggactgtttcttggtggcaactatgtttcaggtgttgccttggggcggtgtatagagggtgcttatgagtctgcagctgaggtagtagatttcctctcacagtactcagacaaa

SEQ ID NO: 122 - DNA, 1593 bp, Hordeum vulgare
  source 1..1593: mol_type = unassigned DNA
atggccggtgcaggtgcaaccatggccaccgccaccgcgccgccgctccgcggcagggtcacccggcgcccgcacggcgtccgcccgcgttgcgcggccgcgggcagcgcgaccgagacccccgcggcgcccggcgtgcgtctgtccgcggactgcgtcatcgtgggcgccggcatcagcggcctctgcaccgcgcaggcgctggccacccggcacggcgtcggcgacctgctcgtcacggaggcccgcgaccgcccgggcggcaacatcaccaccgtcgagcgccccgacgaggggtacctctgggaggagggccccaacagcttccagccctccgaccccgtcctcaccatggccgtggacagcgggctcaaggatgacctggtgttcggggaccccaacgcgccccggttcgtgctgtgggaggggaagctgaggccggtgccgtccaagccaggcgacctgccgttcttcagcctcatgagcgtccccgggaagctcagggccggcctcggcgccctcggcattcgcccgcctcctccagggcgcgaggagtcggtggaggagtttgtgcgccgcaacctcggtgccgaggtctttgagcgccttatcgaacctttctgctcaggtgtgtatgctggtgatccttcgaagctcagtatgaaggctgcatttgggaaggtttggaggttggaggagattgggggtagtattattggtggaaccatcaaggcaattcaggataaagggaagaaccccaaaccgccaagggatccccgacttccggcaccaaagggacagacggtggcatctttcaggaagggtctggccatgctcccgaatgccatcgcatctaggttgggtagtaaagtcaagctgtcatggaagcttacgagcattacaaaggcggacaaccaaggatatgtattaggttatgaaacaccagaaggacttgtttcagtgcaggctaaaagtgttatcatgaccatcccgtcatatgttgctagtgatatcttacgcccactttcaattgatgcagcagatgcactctcaaaattctattatccgccagttgctgctgtaactgtttcatatccaaaagaagctattagaaaagaatgcttaattgatggggagctccagggtttcggccagctgcatccacgtagccaaggagtcgagactttagggacaatatatagctcttctctctttcccaatcgtgctcctgctggaagagtgttacttctgaactatatcgggggttctacaaatacagggatcgtctccaagaccgagagtgacttagtagaagctgttgatcgtgatctcagaaaaatgttgataaaccctagagcagcagaccctttagcattaggggtcagagtgtggccacaagcaataccacagtttttgattggacaccttgatcgccttgctgctgcaaaatctgcactgggccgaggcgggtacgacgggttattcctaggaggaaactacgtagcaggagttgccttgggccgatgcatcgagggtgcgtacgagagtgcctcacaagtatctgacttcttgaccaagtatgcctacaagtga

SEQ ID NO: 123 - DNA, 1665 bp, Hordeum vulgare
  source 1..1665: mol_type = unassigned DNA
atgctcacttccgccaccgctcccccctcctcctcctcctgctcgtcccacgctcccgcccgcttcgcctccccgtcccggccccgtcgctccgcgtccgcgtccgcgcgcgggcgagggcgccgcgtccgccccgtgctcgccatggccgcctccgacgacccccgcgccaggtcggtcgccgtcgtcggcgccggcgtcagtgggctcgtggcggcgtacatgctgaggaagagcggcgtgcgggtcaccgtgttcgaggcggaagaccgcgcgggagggaagatacggaccaactccgacggcggattcctctgggacgaaggagccaacaccatgacagaaagtgcactggaggctagtaggctaatcgacgatcttggtcttcaggacagactgcagtatcctaactcccagcacaagcgttacaccgttaaggatggggcgccagcactgattccttcagatcccattgcgctaatgaaaagcactgttctttctacgaaatcaaagttcaagttatttctggaaccatttctctatgaaaaatctagcacaaggaactccaaaaaagtgtctgacgagcatttgcgcgagagcgttgggagtttttttgaacgccattttgggaaagaggttgttgactatcttattgatccatttgtagctggaacaagtgcaggagatcccgagtcattatctattcgtcatgcatttccggggttatggaatttagaaaaaaagtatggttctctcatcgttggtgccatcttgtcaaaactaacagctaaaggtggttcagcaaagaaaggaggcgcttcgtcaggaaaaggaaggaacaagcgggcctcattttcatttcatggtggcatgcagacactagtagacgcacttcacaaggaagttggagatactaatgtgaagcttggaacacaagtattgtcattggcgtgtaactgtgatggactctctgcatcagatgggtggtcaatttttgttgattcaaaggatgctagtagtaaggagcttgcaaggaaccaatcctttgatgctgttataatgacagctccactgtccaatgtccagaggatgaagttcacaaaaggcggacgtccctttgtgctagactttcttcctaaggtggattatctgccgttgtccctcatggtaacagcatttaagaaggaagacgtcaaaagacccctcgaaggatttggggtcttaataccctttaaggaacaacaaaaacatggtttgaaaacgctcggaactctcttctcctctatgatgttcccagatcgagctcctaatgaccagcacttgtttacaacattcattgggggaagccacaatagagatctcgctggagctccaacggctatcttgaaacaatttgtgacatctgaccttacaaagctactgggggtagaggggcagccaacttttgtgaaacatatacattggagaaatgcttttcctttgtatggccatgattatgatttggcactggaagctataggaaagatggaaggtgatctcccagggttcttctatgcaggaaataacaaggatgggttggctgttggaaatgtcatagcttcaggaagtaacactgcagaccttgtgatctcataccttgagtcaggcatcaagcatgttaattga

SEQ ID NO: 124 - DNA, 1593 bp, Triticum aestivum
  source 1..1593: mol_type = unassigned DNA
atggccggcgcaacaatggccaccgccaccgtcgcggccgcgtcgccgctccgcggcagggtcaccgggcgcccacaccgcgtccgcccgcgttgcgctaccgcgagcagcgcgaccgagactccggcggcgcccggcgtgcggctgtccgcggaatgcgtcattgtgggcgccggcatcagcggcctctgcaccgcgcaggcgctggccacccgatacggcgtcagcgacctgctcgtcacggaggcccgcgaccgcccgggcggcaacatcaccaccgtcgagcgtcccgacgaggggtacctgtgggaggagggacccaacagcttccagccctccgacccggtcctcaccatggccgtggacagcgggctcaaggatgacttggtgttcggggaccccaacgcgccccggttcgtgctgtgggaggggaagctgaggccggtgccgtcgaagccaggcgacctgcctttcttcagcctcatgagtatccctgggaagctcagggccggccttggcgcgctcggcattcgcccacctcctccagggcgcgaggagtcggtggaggagtttgtgcgccgcaacctcggtgccgaggtctttgagcgcctcatcgagcctttctgctcaggtgtatatgctggtgatccttcgaagcttagtatgaaggctgcatttgggaaggtctggaggttggaggagattggaggtagtattattggtggaaccatcaaggcgattcaggataaagggaagaaccccaaaccgccaagggatccccgacttccggcaccaaagggacagacggtggcatctttcaggaagggtctagccatgctcccgaatgccatcgcatctaggctgggtagtaaagtcaagctgtcatggaagcttacgagcattacaaaggcggacaaccaaggatatgtattaggttatgaaacaccagaaggacttgtttcagtgcaggctaaaagtgttatcatgaccatcccgtcatatgttgctagtgatatcttgcgcccactttcaattgatgcagcagatgcactctcaaaattctattatccgccagttgctgctgtaactgtttcatatccaaaagaagctattagaaaagaatgcttaattgatggggagctccagggtttcggccagttgcatccacgtagccaaggagtcgagactttagggacaatatatagctcttctctctttcctaatcgtgctcctgctggaagagtgttacttctgaactatatcgggggttctacaaatacagggatcgtctccaagactgagagtgacttagtaggagccgttgaccgtgacctcagaaaaatgttgataaaccctagagcagcagaccctttagcattaggggttcgagtgtggccacaagcaataccacagtttttgattgggcaccttgatcgccttgctgctgcaaaatctgcactgggccaaggcggctacgacgggttgttcctaggaggaaactacgtcgcaggagttgccttgggccgatgcatcgagggtgcgtacgagagtgcctcacaagtatctgacttcttgaccaagtatgcctacaag

SEQ ID NO: 125 - DNA, 1506 bp, Solanum lycopersicum
  source 1..1506: mol_type = unassigned DNA
atggctccatctgccggagaagataaacaaaagagagttgcagtcattggtgctggcgtcagtggacttgctgcagcatacaagttgaaagttcatggcttgaatgtcacagtatttgaagcagaagggagagctggagggaagttacgaagcctgagtcaagatggcctaatatgggatgaaggcgcaaatactatgactgaaagtgaaggtgatgtcacatttttgcttgattcgcttggactccgagaaaaacaacaattcccactttcacagaacaagcgctacattgccagaaatggtactcctactctgataccttcaaatccatttgacctattcaaaagcaattttctttccactggatcaaagcttcagatgcttttcgagccacttttgtggaagaataaaaagcttacaaaggtgtctgacaaacacgaaagtgtcagtggattcttccagcgtcattttggaaaggaggttgtcgactatctaattgacccttttgttgctggaacatgtggtggtgatcctgattcgctttcaatgcacctttcatttccagacttgtggaatttagagaaaaggtttggttcagtcatagttggggcaattcaatctaagttatctcctataaaggaaaagaaacaagggccacccagaacttcaataaataagaagcgccagcgggggtccttttcatttttgggcggaatgcaaacacttactgacgcaatatgcaaaaatctcaaagaagatgaacttaggctaaactctagagttctggaattatcttgtagctgtagtggggactctgcgatagatagctggtcaattttttctgcctctccacacaagcggcaagcagaagaagaatcatttgatgctgtaattatgacggcccctctctgtgacgttaagagtatgaagattgctaagagaggaaatccatttctgctcaactttattcctgaggtcgattatgtaccactatctgttgttataaccacatttaagaaggagagtgtaaagcatccccttgagggttttggagtgcttgtaccctcccaggagcaaaaacatggtctgaagacactaggcaccctcttctcttctatgatgtttccagatcgtgcacccaacaatgtctatctctatactacatttgttggtggaagccgaaatagagaactcgcgaaagcctcgaggactgagctgaaagagatagtaacttctgaccttaagcagttgttgggtgctgagggagagccaacatatgtgaatcatttatgctggagtaaagcatttccattgtacgggcataactatgattcagtcctagacgcaattgacaaaatggagaaaagccttcctggattattctatgcaggtaaccacaaggggggattgtcagttggcaaagcattatcttctggatgcaatgcagcagatcttgttatatcatatcttgaagcggtttcagctgacaccaaaaaccatagctga

SEQ ID NO: 126 - DNA, 1677 bp, Solanum lycopersicum
  source 1..1677: mol_type = unassigned DNA
atgacaacaacggccgtcgtcaaccatcctagcattttcactcaccggtcgccgctgccgtcgccgtcctcctcctcatcctcatcgccgtcatttttatttttaaatcgtacgaattttattccatacttttccacctccaagcgcagtagtgtcaattgcaatggctggagaacacggtgttccgttgcgaagaattatacagttcctccctcagaagttgacggtaatcagttaccggagctggattgtgtggtagtcggagcaggaattagtggtctctgcattgctaaggtgatatcggctaattatcccaatttgatggtgacggaggcgagggatcgtgccggtggaaacataacgacggtggaaagagatggatacttatgggaagaaggtcctaacagtttccagccttcggatcctatgttgactatggctgtagattgtggattgaaggatgatttggtgttgggagatcctgatgcgcctcgctttgtcttgtggaaggataaactaaggcctgttcccggcaagctcactgatcttcccttctttgatttgatgagtattcctggcaagctcagagctggttttggtgccattggccttcgcccttcacctccaggttatgaggaatcagttgagcagttcgtgcgtcgtaatcttggtgctgaagtctttgaacgtttgattgaaccattttgttctggtgtttatgctggcgacccatcaaaattgagtatgaaagcagcatttgggaaagtgtggaagctagaacaaactggtggtagcattattgggggaacctttaaggcaataaaggagagatccagtaaccctaaaccgcctcgtgatccgcgtttaccaacaccaaaaggacaaactgttggttcatttaggaagggtctgagaatgctgccagatgcaatttgtgaaagactgggaagcaaagtgaaactatcatggaagctttctagcattacaaagtcagataaaggaggatatctcttgacatacgagacaccagaaggagtagtttctctgcgaagtcgaagcattgtcatgactgttccatcctatgtagcaagcaacatattacgccctctttcggtcgccgcagcagatgcactttcaagtttctactatcccccagttgcagcagtgacaatttcatatcctcaagaggctattcgtgatgagcgtctggttgatggtgaactaaagggatttgggcagttgcatccacgttcacagggagtggaaacactaggaacaatatatagttcatcactcttccctaaccgtgctccaaatggccgggtgctactcttgaactacattggaggagcaacaaatactgaaattgtgtctaagacagagagccaacttgtggaagcagttgaccgtgacctcagaaagatgcttataaaacccaaagcacaagatccctttgttacgggtgtgcgagtatggccacaagctatcccacagtttttggtcggacatctggatacactaggtactgctaaagctgctctaagtgataatgggcttgacgggctattccttgggggtaattatgtgtctggtgtagcattgggaaggtgtgttgaaggtgcttatgaaattgcatctgaagtaactgggtttctgtctcagtatgcatacaaatga

SEQ ID NO: 127 - DNA, 1620 bp, Gossypium hirsutum
  source 1..1620: mol_type = unassigned DNA
atgacggctctaatcgacctttctcttctccgctcctcgccctccgtttcccctttctccataccccaccaccagcttccgccccgctctcgtaaacctttcaagctccgatgctccctcgccgagggtcccacgatttcctcatctaaaatcgacgggggagaatcatccatcgcggattgcgtcgtcgttggaggtggtatcagtggactttgcattgctcaagctctcgccaccaagcaccgtgacgtcgcttccaatgtgattgtgacggaagccagagaccgtgttggtggcaacatcactaccgttgagagagatggatatctgtgggaagaaggacccaacagttttcagccctccgatcctattctaaccatggccgtggatagtggattgaaggacgatttagttttaggtgaccctaatgcaccgcgatttgtactgtgggagggaaaactaaggcctgtgccctccaagccaaccgacttgccgttttttgacttgatgagcattgctggaaaacttagggctgggttcggggctattggcattcggcctccccctccgggttatgaagaatcggtggaggagtttgtgcgccgtaatcttggtgctgaggtttttgaacgctttattgaaccattttgttcaggtgtttatgcaggggatccttcaaaattaagcatgaaagcagcatttggaagagtatggaagctagaagagattggtggcagcatcattggtggcactttcaagacaatccaggagagaaataagacacctaagccacccagagacccgcgtctgccaaaaccgaagggccaaacagttggatcttttaggaagggacttaccatgctgcctgaggcaattgctaacagtttgggtagcaatgtaaaattatcttggaagctctccagtattaccaaattgggtaatggagggtataacttgacatttgaaacacctgaaggaatggtatctcttcagagtagaagtgttgtcatgaccattccatcccatgttgccagtaacttgttgcatcctctctcggctgctgctgcagatgcattatcccaattttattatcctccagttgcatcagtcacagtctcctatccaaaagaagccattcgaaaagaatgtttgattgatggtgaacttaaggggtttggccagttgcacccacgcagccaaggaatcgaaactttagggacgatatacagttcatcacttttccccaatcgagctccatctggcagggtgttgctcttgaactacataggaggagctaccaacactggaattttgtccaagactgaaggggaacttgtagaagcagttgatcgtgatttgagaaaaatgcttataaatcctaatgcaaaggatcctcttgttttgggtgtaagagtatggccaaaagccattccacagttcttggttggtcatctggatctccttgatactgcaaaaatggctctcagggattctgggtttcatggactgtttcttgggggcaactatgtatctggtgtggcattaggacggtgtgtggaaggtgcttacgaggttgcagctgaagtgaaggaattcctgtcacaatatgcatacaaataa

SEQ ID NO: 128 - DNA, 1683 bp, Beta vulgaris
  source 1..1683: mol_type = unassigned DNA
atgaaatcaatggcgttatcaaactgcattccacagacacagtgcatgccattgcacagcagcgggcattacaggggcaattgtatcatgttgtcaattccatgtagtttaattggaagacgaggttattattcacataagaagaggaggatgagcatgagttgcagcacaagctcaggctcaaagtcagcggttaaagaagcaggatcaggatcaggatcaggagcaggaggattgctagactgcgtaatcgttggaggtggaattagcgggctttgcatcgcgcaggctctttgtacaaaacagtcctctttatccccaaattttatagtgacagaggccaaagacagagttggcggcaacatcgtcactgtggaggccgatggctatatctgggaggagggacccaatagcttccagccttccgacgcggtgctcaccatggcggtcgacagtggcttgaaagatgagttggtgctcggagatcccaatgctcctcgctttgtgctgtggaatgacaaattaaggcccgtaccttccagtctcaccgacctccctttcttcgacctcatgaccattcccggcaagattagggctgctcttggtgctctcggatttcgcccttctcctccacctcatgaggaatctgttgaacactttgtgcgtcgtaatctcggagatgaggtctttgaacgcttgattgaacccttttgttcaggtgtgtatgccggtgatcctgccaagctgagtatgaaagctgcttttgggaaggtctggaagttggagcaaaagggtggcagcataattggtggcactctcaaagctatacaggaaagagggagtaatcctaagccgccccgtgaccagcgcctccctaaaccaaagggtcagactgttggatcctttagaaagggactcgttatgttgcctaccgccatttctgctcgacttggcagtagagtgaaactatcttggaccctttctagtatcgtaaagtcactcaatggagaatatagtctgacttatgataccccagatggcttggtttctgtaagaaccaaaagtgttgtgatgactgtcccatcatatgttgcaagtaggcttcttcgtccactttcagactctgctgcagattctctttcaaaattttactatccaccagttgcagcagtgtcactttcctatcctaaagaagcgatcagatcagaatgcttgattaatggtgaacttcaaggtttcgggcaactacatccccgcagtcagggtgtggaaaccttgggaacaatttatagttcgtctcttttccctggtcgagcaccacctggtaggatcttgatcttgagctacatcggaggtgctaaaaatcctggcatattaaacaagtcgaaagatgaacttgccgagacagttgacaaggacctgagaagaatgcttataaatcctgatgcaaaacttcctcgtgtactgggtgtgagagtatggcctcaagcaataccccagttttctattgggcactttgatctgctcgatgctgcaaaagctgctctgacagatacaggggtcaaaggactgtttcttggtggcaactatgtttcaggtgttgccttggggcggtgtatagagggtgcttatgagtctgcagctgaggtagtagatttcctctcacagtactcagacaaatag

SEQ ID NO: 129 - protein, 98 aa, Amaranthus sp.
MVIQSITHLSPNLALPSPLSVSTKNYPVAVMGNISEREEPTSAKRVAVVGAGVSGLAAAYKLKSHGLSVTLFEADSRAGGKLKTVKKDGFIWDEGANT

SEQ ID NO: 130 - protein, 98 aa, Amaranthus sp.
MVIQSITHLSPNLALPSPLSVSTKNYPVAVMGNISEREEPTSAKRVAVVGAGVSGLAAAYKLKSHGLSVTLFEANSRAGGKLKTVKKDGFIWDEGANT

SEQ ID NO: 131 - protein, 98 aa, Amaranthus sp.
MVIQSITHLSPKLALPSPLSVSTKNYPVAVMGNISEREEPTSAKRVAVVGAGVSGLAAAYKLKSHGLNVTLFEADSRAGGKLKTVKKDGFIWDEGANT

SEQ ID NO: 132 - protein, 98 aa, Amaranthus sp.; identical to SEQ ID NO: 131

SEQ ID NO: 133 - protein, 113 aa, Echinochloa sp.
MLTLLFGVTSAGRATMVIQSTTHLSPNLALPSPLSVSTKNYPVAVMGNISEREEPTSAKRVAVVGAGVSGLAAAYKLKSHGLSVTLFEADSRAGGKLKTVKKDGFIWDEGANT

SEQ ID NO: 134 - protein, 97 aa, Spinacia oleracea
MVILPVSQLSTNLGLSLVSPTKNNPVMGNVSERNQVNQPISAKRVAVVGAGVSGLAAAYKLKSNGLNVTLFEADSRAGGKLKTVVKDGLIWDEGANT

SEQ ID NO: 135 - protein, 96 aa, Beta vulgaris
  source 1..96: note = subsp. vulgaris
MVMLYDSHLSGVSTHLQLSQAFPRKNPLMAKVSEPGKPTSAKRIAVVGAGVSGLAAAYKLKSHGLSVTLFEADTRAGGKLKTVAKDGLIWDEGANT

SEQ ID NO: 136 - protein, 94 aa, Solanum tuberosum
MAPSAGEDKQSNLLYPHVSLHNSTISQAKLTQFFCVDCPKRVAVIGAGVSGLAAAYKLKIHGLDVTVFEAEGRAGGKLRSLSQDGLIWDEGANT

SEQ ID NO: 137 - protein, 88 aa, Gossypium sp.
MLNIAPSCVLASGISKPVTKMASTENKDDHSSAKRVAVIGAGVSGLAAAYKLKSQGLHVTVFESEGRAGGKLRSVSREGLIWDEGANT

SEQ ID NO: 138 - protein, 122 aa, Eucalyptus sp.
MTGSTICSWKTRTVDGPNPELWSARRRRPPLSSLSISIGKPEQRGAHGQQRHAKMSSAAGADISSKTLHALSSSQLTYGLAAAHKLKSNGVDVTVYEAEGRIGGKLRSVSQGGLIWDEGANT

SEQ ID NO: 139 - protein, 72 aa, Coffea sp.
MASPAPKEKDKSSTCTKKRVAVVGAGVSGLAAAYKLKLRGLNVTVFEADERAGGKLKSVSRDGLIWDEGANT

SEQ ID NO: 140 - protein, 71 aa, Arabidopsis thaliana
MASGAVADHQIEAVSGKRVAVVGAGVSGLAAAYKLKSRGLNVTVFEADGRVGGKLRSVMQNGLIWDEGANT

SEQ ID NO: 141 - protein, 68 aa, Helianthus annuus
MASPTTPDNQKPAKRVAVVGAGVSGCAAAYKLKLHGLNVTVFEADGRVGGKLRSVSQDGLIWDEGANT

SEQ ID NO: 142 - protein, 73 aa, Arabidopsis lyrata
MESGAVGDHDTKFESISGKRVAVVGAGVSGLAAAYKLKSRGLNVTVFEADERAGGKLTSVMQNGLIWDQGANT

SEQ ID NO: 143 - protein, 99 aa, Erythranthe sp.
MRLYSAQYCCPSLLLLSSPSPYPFPITRSTVLSMASAAQQDSAVKSVAVIGAGVSGLSAAYKLKLHGLNVTVFEADARSGGKLRSISHDGLIWDEGANT

SEQ ID NO: 144 - protein, 69 aa, Brassica oleracea
MASNAAADHDKLSGKRVAVVGAGVSGLAAAYKLKSKGVNVTLFEADGRVGGKLRSVMHNGLIWDEGANT

SEQ ID NO: 145 - protein, 68 aa, Ambrosia artemisiifolia
MASPTIVDNQKPAKRVAIVGAGVSGCAAAYKLKLHGLNVTVFEADERVGGKPRSVSQDGLIWDEGANT

SEQ ID NO: 146 - protein, 71 aa, Morus notabilis
MGTSASKQDNPTSPVKSVAVIGAGVSGLAAAYKLKSHGLNVTVFEAEERAGGKLRSVSSHHGLIWDEGANT

SEQ ID NO: 147 - protein, 63 aa, Cucumis sativus
MKSSQSSRKKVAVVGAGVSGLAAAYKLKSHGFDVTVLEADERVGGKLRSVSYKGLIWDEGANT

SEQ ID NO: 148 - protein, 72 aa, Zostera marina
MSLPAMSEISCISTGPAHSVAVVGGGISGLAAAYKLKSNGLSVTVFETEERPGGKIRSRSQDGFIWDEGANT

SEQ ID NO: 149 - protein, 77 aa, Chondrus crispus
MAVAEGATPAPAAASATPSEVDALVIGSGISGSSLAFTLSQASPATSLLLTEARPVVGGNVISRNERGYTWEEGPNT

SEQ ID NO: 150 - protein, 66 aa, Chondrus crispus
MPEPVKRNVAVLGGGPAGLSAAFRLLHDLPPGLSVKVDLYEATGRLGGAVTSACDAGFCYELGPNS

SEQ ID NO: 151 - protein, 109 aa, Oryza nivara
MLSPATTFSSSSSSSSPSRAHARAPTRFAVVASARAARFRPARAMAASDDPRGGRSVAVVGAGVSGLAAAYRLRKRGVQVTVFEAADRAGGKIRTNSEGGFIWDEGANT

SEQ ID NO: 152 - protein, 108 aa, Oryza glumipatula
MLSPATTFSSSSSSSPSRAHAHAPTRFAVAASARAARFRPARAMAASDDPRGGRSVAVVGAGVSGLAAAYRLRKRGVQVTVFEAADRAGGKIRTNSEGGFIWDEGANT

SEQ ID NO: 153 - protein, 65 aa, Oryza sp.
MAASDDPRGGRSVAVVGAGVSGLAAAYRLRKRGVQVTVFEAADRAGGKIRTNSEGGFIWDEGANT

SEQ ID NO: 154 - protein, 109 aa, Oryza sativa
MLSPATTFSSSSSSSSPSRAHARAPTRFAVAASARAARFRPARAMAASDDPRGGRSVAVVGAGVSGLAAAYRLRKRGVQVTVFEAADRAGGKIRTNSEGGFIWDEGANT

SEQ ID NO: 155 - protein, 114 aa, Oryza sativa
MAAAAAAMATATSATAAPPLRIRDAARRTRRRGHVRCAVASGAAEAPAAPGARVSADCVVVGGGISGLCTAQALATKHGVGDVLVTEARARPGGNITTAERAGEGYLWEEGPNS

SEQ ID NO: 156 - protein, 110 aa, Oryza punctata
MLSPATTTTFSSSSSSSSSSSRAHAPTRFAAAASARAARFRPARAMAASDDPHGGRSVAVVGAGVSGLAAAYRLRKRGVQVTVFEAADRAGGKIRTNSEGGFIWDEGANT

SEQ ID NO: 157 - protein, 108 aa, Oryza rufipogon
MLSPATTFSSSSSSSPSRAHARAPTRFAVAASARAARFRPARAMAASDDPRGGRSVAVVGAGVSGLAAAYRLRKRGVQVTVFEAADRAGGKIRTNSEGGFIWDEGANT

SEQ ID NO: 158 - protein, 113 aa, Oryza meridionalis
MLSPATATTTTTTTFSSSSSPSRAHAHASTRFAVAASARAARFRPARAMAASNDPRGGRSVAVVGAGVSGLAAAYRLRKRGVQVTVFEAADRAGGKIRTNSEGGFIWDEGANT

SEQ ID NO: 159 - protein, 100 aa, Zea mays
MLALTASASSASSHPYRHASAHTRRPRLRAVLAMAGSDDPRAAPARSVAVVGAGVSGLAAAYRLRQSGVNVTVFEAADRAGGKIRTNSEGGFVWDEGANT

SEQ ID NO: 160 - protein, 109 aa, Oryza brachyantha
MLSPAATTTTTTSYCSYSSRAHAPTRSASAGAARFRPARAMATSDNDPRGAAPARSVAVVGAGVSGLAAAYKLRKRGVQVTVFEAADRAGGKIRTNSESGFIWDEGANT

SEQ ID NO: 161 - protein, 131 aa, Musa acuminata
MLKQHGSATNRGLLSKIWFARRFGEPVCRDPILLFRLPLDLGRSRRRRCSRKPSCFGEFHRQLAIAMASADNHNSIKSVAVVGGGVSGLAAAYKLKSNGLKVTLFEAEERAGGKIKSSSENGLIWDEGANT

SEQ ID NO: 162 - protein, 70 aa, Populus trichocarpa
MTAAAKDDDFGSKQSKNVAVIGAGVSGLAAAYKLKSNGVKVTVFEAEGRAGGKLRSVSHHDLVWDEGANT

SEQ ID NO: 163 - protein, 108 aa, Avena fatua
MLASATTPSPSSSRASTLFASSSRPRHTASARGRRLRPVLAMAASDDPRAAPARSVAVVGAGVSGLVAAYRLRKSGVRVTVFEADDRAGGKIRTNSDSGFLWDEGANT

SEQ ID NO: 164 - protein, 98 aa, Setaria italica
MLSSSTTTASPASSHPYRPAYPRASLRPVLAMAGSDDPRAAPARSVAVIGAGVSGLAAAYRLRKSGVNVTVFEAADRAGGKIRTNSEAGFLWDEGANT

SEQ ID NO: 165 - protein, 108 aa, Poa annua
MLTSATTPSSSSSASSRACARFASSARPHHTASARGRRLRPVLAMAASDQPRARSVAVVGAGVSGLVAAYRLRKSGVRVTVFEADDRAGGKIRTNSDSGFLWDEGANT

SEQ ID NO: 166 - protein, 100 aa, Sorghum bicolor
MLARTATVSSTSSHSHPYRPTSARSLRLRPVLAMAGSDDSRAAPARSVAVVGAGVSGLVAAYRLRKSGVNVTVFEAADRAGGKIRTNSEGGFLWDEGANT

SEQ ID NO: 167 - protein, 104 aa, Brachypodium distachyon
MLTSATASPSASTRFSSTCRPCRSDSVPARRPRPVLAMAASDDPRAAPARSVAVVGAGVSGLVAAHRLRKSGVRVTVFEADDRAGGKIRTNSDSGFLWDEGANT

SEQ ID NO: 168 - protein, 107 aa, Alopecurus myosuroides
MLTSATTPSSSSASSRASTRFASSSRPRRTASARGRRLRPVLAMAASDDPRARSVAVVGAGVSGLVAAYRLSKSGVRVTVFEADDRAGGKIRTNSDSGFLWDEGANT

SEQ ID NO: 169 - protein, 68 aa, Gossypium raimondii
MASTENKDDHSSAKRVAVIGAGVSGLAAAYKLKSQGLHVTVFESEGRAGGKLRSVSREGLIWDEGANT

SEQ ID NO: 170 - protein, 68 aa, Amaranthus tuberculatus
MGNISERDEPTSAKRVAVVGAGVSGLAAAYKLKSHGLNVTLFEADSRAGGKLKTVKKDGFIWDEGANT

SEQ ID NO: 171 - protein, 68 aa, Amaranthus tuberculatus; identical to SEQ ID NO: 170

SEQ ID NO: 172 - protein, 70 aa, Brassica rapa
MASNAVADHDKPVSGKRVAVVGAGVSGLAAAYKLKSKGVNVTVFEADGRVGGKLRSVMHNGLIWDEGANT

SEQ ID NO: 173 - protein, 70 aa, Jatropha curcas
MASAPKDERRNPSSGKRVAVVGAGVSGLAAAYKLKSHGLKVTVFEAEGRAGGKLRSVSRDGLIWDEGANT

SEQ ID NO: 174 - protein, 70 aa, Vitis vinifera
MAEKSDAQSHYNGSGKRVAVVGAGVSGLAAAYKLKLHGVNITLYEAEERAGGKLRSVSQHGLVWDEGANT

SEQ ID NO: 175 - protein, 69 aa, Vitis vinifera
MAEKSDAQSHYNGSGKRVAVVGAGVSGLAAAYKLKLHGVNTLYEAEERAGGKLRSVSQHGLVWDEGANT

SEQ ID NO: 176 - protein, 69 aa, Ricinus communis
MSSVIKEDRNPSHVKRVAVVGAGVSGLAAAYKLKSHGLKVTVFEAEERAGGKLRSVNHDGLIWDEGANT

SEQ ID NO: 177 - protein, 65 aa, Solanum lycopersicum
MAPSAGEDKQKRVAVIGAGVSGLAAAYKLKVHGLNVTVFEAEGRAGGKLRSLSQDGLIWDEGANT

SEQ ID NO: 178 - protein, 64 aa, Kochia sp.
MADLSETSVKRVAVVGAGVSGLAAAYKLKSHGFNVTLFEAEPRAGGKIKTVAKDGLIWDEGANT

SEQ ID NO: 179 - protein, 66 aa, Prunus persica
MTSLTTKEGSVKRVAVVGAGVSGLAAAYKLKSHGFDVTVFEAEGRAGGKLRSVSHDGLIWDEGANT

SEQ ID NO: 180 - protein, 68 aa, Theobroma cacao
MAAAKNKDKQTSAKRVAVVGAGVSGLAAAYKLKSHGLNVTMFEAEGRAGGKLRSVSQEGLIWDEGANT

SEQ ID NO: 181 - protein, 68 aa, Glycine max
MASSATDDNPRSVKRVAVVGAGVSGLAAAYKLKSHGLDVTVFEAEGRAGGRLRSVSQDGLIWDEGANT

SEQ ID NO: 182 - protein, 68 aa, Citrus clementina
MASAPGEDNQRSAKRVAVVGAGVSGLAAAYKLKSNGVNVMVFEADERAGGKLRSISKDGLIWDEGANT

SEQ ID NO: 183 - protein, 68 aa, Citrus clementina
MTNKWRVDFSGSAKRVAVVGAGVSGLAAAYKLKSNGVNVMVFEADERAGGKLRSISKDGLIWDEGANT

SEQ ID NO: 184 - protein, 68 aa, Medicago truncatula
MASSAKDDNPRSVKRVAVVGAGVSGLAAAYKLKSHGLDVTVFEAEGRAGGRLRTVSRDGLVWDEGANT

SEQ ID NO: 185 - protein, 68 aa, Phaseolus vulgaris
MSSSATDDNPRSVKRVAVIGAGVSGLAAAYKLKSHGLDVTVFEAEGRAGGRLRSVSRDGLIWDEGANT

SEQ ID NO: 186 - protein, 68 aa, Vigna angularis
MSSSATDDNPRSVKRVAVIGAGVSGLAAAYKLKSHGVDVTVFEAEGRAGGRLRSVSRDGLIWDEGANT

SEQ ID NO: 187 - protein, 68 aa, Gossypium arboreum
MASTENKDDHSSAKRVAVIGAGVSGLAAAYKLKSQGLHVTVFESEGRAGGKLRSVSRDGLIWDEGANT

SEQ ID NO: 188 - protein, 68 aa, Nicotiana tabacum
MAPSAGEDKHSSAKRVAVIGAGVSGLAAAYKLKIHGLNVTVFEAEGKAGGKLRSVSQDGLIWDEGANT

SEQ ID NO: 189 - protein, 68 aa, Ambrosia artemisiifolia
MASPTIVDNQKPAKRVAIVGAGVSGCAAAYKLKLHGLNVTVFEADGRVGGKLRSVSQDGLIWDEGANT

SEQ ID NO: 190 - protein, 68 aa, Solanum tuberosum
MAPSAGEDKQNCPKRVAVIGAGVSGLAAAYKLKIHGLNVTVFEAEGRAGGKLRSLSQDGLIWDEGANT

SEQ ID NO: 191 - protein, 68 aa, Solanum tuberosum
MAPSAGEDKQNCPKRVAVIGAGVSGLAAAYKLKIHGLDVTVFEAEGRAGGKLRSLSQDGLIWDEGANT

SEQ ID NO: 192 - protein, 69 aa, Brassica napus
MASNAAADHDKLSGKRVAVVGAGVSGLAAAYKLKSKGVNVTVFEADGRVGGKLRSVIRNGLIWDEGANT

SEQ ID NO: 193 - protein, 69 aa, Brassica napus
MASNAVADHDKLSGKRVAVVGAGVSGLAAAYKLKSKGVNVTVFEADGRVGGKLRSVMHNGLIWDEGANT

SEQ ID NO: 194 - protein, 70 aa, Picea sitchensis
MAEHIHTDQNDKRPLKSVAVVGAGISGLAAAYRLKSQGLAVTIFEADGTTGGKIKSFAQNGLIWEKGANT

SEQ ID NO: 195 - protein, 67 aa, Brachypodium distachyon
MAASDDPRAAPARSVAVVGAGVSGLVAAHRLRKSGVRVTVFEADDRAGGKIRTNSDSGFLWDEGANT

SEQ ID NO: 196 - protein, 64 aa, Triticum aestivum
MAASDDPRARSVAVVGAGVSGLVAAYRLRKSGVRVTVFEAEDRAGGKIRTNSDGGFLWDEGANT

SEQ ID NO: 197 - protein, 65 aa, Oryza glaberrima; identical to SEQ ID NO: 153

SEQ ID NO: 198 - protein, 67 aa, Selaginella moellendorffii
MAMAEGETAPVLGSVAVVGAGASGLAAAYRLRAAGVSVTVYEAENSIGGKLKSVSENGFIWEKGPNT

SEQ ID NO: 199 - protein, 67 aa, Selaginella moellendorffii
MAMAEGETVPVLGSVAVVGAGASGLAAAYRLRAAGVSVTVYEAENSIGGKLKSVSENGFIWEKGPNT

SEQ ID NO: 200 - protein, 97 aa, Triticum aestivum
MLTSATAPSSSCSSHAPTRFASARGRRLRPVLAMAASDDPRARSVAVIGAGVSGLVAAYRLRKSGVRVTVFEAEDRAGGKIRTNSDGGFLWDEGANT

SEQ ID NO: 201 - protein, 112 aa, Hordeum vulgare
MLTSATAPPSSSSCSSHAPARFASPSRPRRSASASARGRGRRVRPVLAMAASDDPRARSVAVVGAGVSGLVAAYMLRKSGVRVTVFEAEDRAGGKIRTNSDGGFLWDEGANT

SEQ ID NO: 202 - protein, 70 aa, Ginkgo sp.
MAAPLHPDNNSRRPHKSVAIVGAGISGLAAAYRLKSEGLAVTVFEAEESTGGKIKSISQDGLVWEKGPNT

SEQ ID NO: 203 - protein, 65 aa, Phytophthora capsici
MAARDVVVLGGGISGLTLAYFLRQALPKAAADATRIRVLDASAISGGWVHTAKREGFLFEEGPRG

SEQ ID NO: 204 - protein, 76 aa, Lemna sp.
MEADAGKGSAGGAQILSHDSVRSVAVIGGGISGLAAAYKLKSNGFRAVVFEAEGKAGGKIRSGSQEGLIWDEGANT

SEQ ID NO: 205 - protein, 135 aa, Capsella rubella
MHDAGDSHDPFEIHKHVDVELKSGLDAKTLNKGPLDKRLKIIGPEELKTRFDAELSWLLLITMASAKVADNDTKFEAVSGRRVAVVGGGVSGLAAAYKLKSKGLNVTVFEADGRAGGKLRSVMHNGLIWDEGANT

SEQ ID NO: 206 - protein, 66 aa, Eutrema salsugineum
MAPDAVADHDKKFEALSGKRVAVVGAGVRLKSRGLNVTVFEADGRAGGKLRSVMHKGLIWDEGANT

SEQ ID NO: 207 - protein, 121 aa, Glycine max
MVSVFNEILFPPNQTLLRPSLHSPTSFFTSPTRKFPRSRPNPILRCSIAEESTASPPKTRDSAPVDCVVVGGGVSGLCIAQALATKHANANVVVTEARDRVGGNITTMERDGYLWEEGPNS

SEQ ID NO: 208 - protein, 117 aa, Gossypium raimondii
MTALIDLSLLRSSPSVSPFSIPHHQHPPRFRKPFKLRCSLAEGPTISSSKIDGGESSIADCVIVGGGISGLCIAQALATKHRDVASNVIVTEARDRVGGNITTVERDGYLWEEGPNS

SEQ ID NO: 209 - protein, 115 aa, Brassica napus
MDLSLLRPQPFLSPFSNPFPRSRPYKPLNLRCSVSGGSVVVGSSTIEGGGGGKTVAADCVIVGGGISGLCIAQALVTKHPDAAKSVMVTEAKDRVGGNIITREEQGFLWEEGPNS

SEQ ID NO: 210 - protein, 114 aa, Brassica napus
MDLSLLRPQPFLSPFSNPFPRSRPYKPLNLRCSVSGGSVVGSSTIEGGGGGKTVTADCVIVGGGISGLCIAQALVTKHPDAAKNVMVTEAKDRVGGNIITREEQGFLWEEGPNS

SEQ ID NO: 211 - protein, 62 aa, Bacteria sp.
  source 1..62: note = Bacteria (prokaryote)
MTRHVVILGGGVTGLAAAYRLRRTVPSPDDLAITLVERRSRLGGSIGTERHEGYLIESGVDS

SEQ ID NO: 212 - protein, 113 aa, Setaria italica
MVAAAMATAPSAGVPPLRGTRGPARFRIRGVSVRCAAVAGGAAEAPASAGARVSADCVVVGGGISGLCTAQALATKHGVGDVLVTEARARPGGNITTVERPDEGYLWEEGPNS

SEQ ID NO: 213 - protein, 115 aa, Zea mays
MVAATATATAMATAASPLLNGTRIPARLRHRGLSVRCAAVAGGAAEAPASTGARLSADCVVVGGGISGLCTAQALATRHGVGDVLVTEARARPGGNITTVERPEEGYLWEEGPNS

SEQ ID NO: 214 - protein, 109 aa, Triticum aestivum
MAGATMATATVAAASPLRGRVTGRPHRVRPRCATASSATETPAAPGVRLSAECVIVGAGISGLCTAQALATRYGVSDLLVTEARDRPGGNITTVERPDEGYLWEEGPNS

SEQ ID NO: 215 - protein, 109 aa, Brachypodium distachyon
MATATMATAAATAAPPRRLRVPAPPRGGHARCAVASNATEAPAAPGARLSADCVIVGGGISGLCTAQALATKYGFGDVLVTEARARPGGNITTVERPDEGYLWEEGPNS

SEQ ID NO: 216 - protein, 162 aa, Populus trichocarpa
MTVKQSSVARIKGLINPSSSQITSLQGSGSFACQTESEPAMTSTFTDLSLLRPTIPSLIPSSFSKFTTHRPLKLRCSLTEDSTTFIPFKLNGEAQSSAGHSATADCVIVGGGISGLCIAQALATKHWDVAPNVIVTEARDRVGGNITTLERDGYLWEEGPNS

SEQ ID NO: 217 - protein, 121 aa, Populus trichocarpa
MTTFIDFSLLRPTTPSLIPSSFSKFSTPRPFKLRCSLTEESATITPSKLNGEAQSNGGHSAAADCVIVGGGISGLCIAQALATKHRDVAPNVIVTEARDRVGGNITTLERDGYLWEEGPNS

SEQ ID NO: 218 - protein, 147 aa, Ginkgo sp.
MAMAVEMEAVLTVALQNYPISPLKHFRGTHKKPATISSVFWQCKRNCLAGHAVWKGKTWIGGGVNVVAKEATMAPSGWVENENENDDMYDCVVVGGGISGLSTAQALVSKHSSTVKNVVLTEAKDRVGGNIMTMERDGYLWEEGPNS

SEQ ID NO: 219 - protein, 157 aa, Alopecurus myosuroides
MDFHTIRSPSLYPILVGHGKCKPTNQCSRSRIASSTPHRHLPRAQATEMVGATMAIATVTAALPLRVRVPGRSRRGQARCAVASDATEAPAAPSARLSADCVIVGGGISGLCTAQALATKYGVSDLLVTEARARPGGNITTVERPDEGYLWEEGPNS

SEQ ID NO: 220 - protein, 62 aa, Bacteria sp.
  source 1..62: note = Bacteria (prokaryote)
MKRVVVIGGGISGLSAAYFLKEAAAKKNIDLDYTLIEKSDRLGGNIITEKLDHFIVEGGPDN

SEQ ID NO: 221 - protein, 139 aa, Cyanidioschyzon merolae
MLRWSGSQQVTDRNRAEQHGLVVAFAFPARAPRHSEATHERWTGLAQRERGLCVPLKATKWKRDLWHSRKLQMQEPAQRNREQVQALVVGSGVTGSSFAFLLQHAGISDVICTEARGEVGGNLISRSKDGYLWEEGPNT

SEQ ID NO: 222 - protein, 128 aa, Amaranthus tuberculatus
MSAMALSSSILQCPPHSDISFRFFAHTRTQSPIFFGRPRKLSYIHCSTSSSSTANYQNTITSQGEGDKVLDCVIVGAGISGLCIAQALSTKHIQSNLNFIVTEAKHRVGGNITTMESDGYIWEEGPNS

SEQ ID NO: 223 - protein, 113 aa, Conyza canadensis
MTSLTNFTPLKLTNPNYLTTTTTYNHRKLSNFRFRCSIARDSPTAPSISGDSSSRPLLDCVVVGAGISGLCIAQALSTKHGGDVVVTEARERVGGNISTVERDGYLWEEGPNS

SEQ ID NO: 224 - protein, 121 aa, Lemna sp.
MASSAAISPLHFSPAPPRRRELSHRCRVRCSIAGKPPATAANDSSATSVTGGEPVRRLRADCVIVGAGISGLCTAQALTVRPAAGRSSAPDVLVTEARDRVGGNITTVERDGYLWEEGPNS

SEQ ID NO: 225 - protein, 143 aa, Kochia sp.
MSAMASPSIIPQSFLQRSPTSLQSRSNYSKNHIIISISTPCSHGKNQRRFLRKTTHFRSIHCSTISTSTPTSSSNPGTLGEGGLLDCVIVGGGISGLCIAQALSTKYSSLSTNFIVTEAKDRVGGNITTKEDDGYIWEEGPNS

SEQ ID NO: 226 - protein, 115 aa, Arabidopsis thaliana
MELSLLRPTTQSLLPSFSKPNLRLNVYKPLRLRCSVAGGPTVGSSKIEGGGGTTITTDCVIVGGGISGLCIAQALATKHPDAAPNLIVTEAKDRVGGNIITREENGFLWEEGPNS

SEQ ID NO: 227 - DNA, 639 bp, synthetic construct
  source 1..639: mol_type = other DNA
  misc_feature 1..639: note = Expression cassette
atgactactgctgttactgctgctgtgtctttcccaagtaccaagaccacctctctcagtgctaggtctagttctgtgatctctcctgataagatctcttacaagaaggtgccactctactacagaaacgtgtcagctaccggaaagatgggacctatcagggctcaaatcgcttcttgctctagtatggatgctccttctgatgcattcctctgggtgaaggctctccacattatcgctgttgtttgctggttcgctgcactcttctacctccctagactctacgtgtaccacgctatgtctgaggatgatacctctcatagaaggttcgaggtgatggaaagaaagctctacaggggtatcatgtggccatctatgatcgctactctcatcaccgctcactttctcgtggattggggagatgctactagacactaccatgaggcactctggttctacatcaaggttggacttgttggactcctcgtgatctaccatttcgtgtgcggttactatagaaagaagctcatcggaaacgctcactacaagtctcacaagttttggagatacttcaacgagatgcctaccctcatcctcttcgctgtggttatcctcgttgtggtgaagcctcaattctga

SEQ ID NO: 228 - DNA, 747 bp, synthetic construct
  source 1..747: mol_type = other DNA
  misc_feature 1..747: note = Expression Cassette
atggttattcagtctattacccacctctccccaaacctcgctttgccatctccactttctgtgtccaccaagaactacccagttgctgtgatgggcaacatctctgagagagaggaacctacctctgctaagagggttgcagttgttggagctggtgtttctggacttgctgctgcttacaagctcaagtcccacggactttcagtgacccttttcgaggctgattctagggctggtggaaagcttaagaccgtgaagaaggatggcttcatctgggatgagggtgctaacactatggatgccccatccgatgctttcttgtgggttaaggctctccacattatcgctgtggtttgctggttcgctgcactcttctaccttccaaggctttacgtgtaccacgccatgtctgaggatgacacctctcatagaaggttcgaggtgatggaacgtaagctctacaggggcattatgtggccatccatgattgccacccttattaccgctcacttcctcgtggattggggagatgctactaggcattaccatgaggccctctggttctacattaaggtgggattggtgggactcctcgtgatctaccatttcgtgtgcggctactaccgtaagaagctcattggaaacgcccactacaagagccacaagttttggagatacttcaacgagatgcccaccctgattcttttcgccgtggttattcttgtggtggtgaagccacagttctag

SEQ ID NO: 229 - DNA, 1086 bp, synthetic construct
  source 1..1086: mol_type = other DNA
  misc_feature 1..1086: note = Expression cassette
atgactactgctgttactgctgctgtgtccttcccatctactaagaccaccagcctttccgccagatcctcctctgttatctccccagacaagatctcctacaagaaggtgcccctctactacagaaacgtgtcagctactggaaagatgggcccaatcagggctcagattgcttcctgctcatccatgaagccagatgctcatcaggtgaagcagttcttgcttaacctccaggataccatctgccagcagttgactgctgttgatggtgctgagttcgttgaggattcttggcaaagggaagctggtggtggtggaaggtctagagttcttagaaacggtggtgttttcgagcaggctggcgtgaacttctctcatgttcatggtgaagctatgccagcttctgctactgctcatagaccagagcttgccggaagatctttcgaggctatgggagtttctcttgtggtgcatccacacaacccatacgttccaacctctcacgcaaacgtgagattcttcattgctgagaagccaggcgctgatccagtttggtggttcggtggtggattcgatcttaccccattctacggcttcgaagaggatgctattcattggcataggaccgctagggatctttgccttccattcggagaggatgtgtaccccaggtacaagaagtggtgcgacgagtacttctacctcaagcacagaaacgagcagaggggaattggaggcctcttcttcgatgatctcaacaccccagatttcgaccgttgcttcgctttcatgcaggctgttggaaagggatacaccgatgcttacctccccatcgttgagagaagaaaggctatggcttacggcgagagagagaggaacttccaactttacagacgtggccgttacgttgagttcaaccttgtttgggatcgtggaacccttttcggacttcaaactggtggtaggaccgagtccatcctcatgtctatgccaccacttgttaggtgggagtacgactaccaacctaaggatggatctccagaggctgctctctccgagttcattaaggttagggattgggtgtga

SEQ ID NO: 230 - DNA, 1194 bp, synthetic construct
  source 1..1194: mol_type = other DNA
  misc_feature 1..1194: note = Expression Cassette
atggttattcagtctattacccacctctccccaaacctcgctttgccatctccactttctgtgtccaccaagaactacccagttgctgtgatgggcaacatctctgagagagaggaacctacctctgctaagagggttgcagttgttggagctggtgtttctggacttgctgctgcttacaagctcaagtcccacggactttcagtgacccttttcgaggctgattctagggctggtggaaagcttaagaccgtgaagaaggatggcttcatctgggatgagggtgccaacactatgaagccagatgctcatcaggtgaagcagttcttgcttaacctccaggataccatctgccagcagcttactgctgttgatggtgctgagttcgttgaggattcttggcaaagggaagctggtggtggtggaaggtctagagttcttagaaacggtggtgttttcgagcaggctggcgtgaacttctctcatgttcatggtgaagctatgccagcttctgctactgctcatagaccagagcttgccggaagatcattcgaggctatgggagtttctcttgtggtgcatccacacaacccatacgttccaacctctcacgcaaacgtgagattcttcattgctgagaagccaggcgctgatccagtttggtggttcggtggtggattcgatcttaccccattctacggcttcgaagaggatgctattcattggcataggaccgctagggatctttgccttccattcggagaggatgtgtaccccaggtacaagaagtggtgcgacgagtacttctacctcaagcacagaaacgagcagaggggaattggaggcctcttcttcgatgatctcaacaccccagatttcgaccgttgcttcgctttcatgcaggctgttggaaagggatacaccgatgcttacctccccatcgttgagagaagaaaggctatggcttacggcgagcgtgagagaaacttccaactttacagacgtggccgttacgttgagttcaaccttgtttgggataggggaaccctcttcggacttcaaactggtggaagaaccgagtccatcctcatgtctatgccaccacttgttaggtgggagtacgactaccaacctaaggatggatctccagaggctgctctctccgagttcattaaggttagggattgggtgtga

SEQ ID NO: 231 - DNA, 999 bp, synthetic construct
  source 1..999: mol_type = other DNA
  misc_feature 1..999: note = Expression Cassette
atggttattcagtctattacccacctctccccaaacctcgctttgccatctccactttctgtgtccaccaagaactacccagttgccgtgtgctcatccatgaagccagatgctcatcaggtgaagcagttcttgcttaacctccaggataccatctgccagcagcttactgctgttgatggtgctgagttcgttgaggattcttggcaaagggaagctggtggtggtggaaggtctagagttcttagaaacggtggtgttttcgagcaggctggcgtgaacttctctcatgttcatggtgaagctatgccagcttctgctactgctcatagaccagagcttgccggaagatctttcgaggctatgggagtttctcttgtggtgcatccacacaacccatacgttccaacctctcacgcaaacgtgagattcttcattgctgagaagccaggcgctgatccagtttggtggttcggtggtggattcgatcttaccccattctacggcttcgaagaggatgctattcattggcataggaccgctagggatctttgccttccattcggagaggatgtgtaccccaggtacaagaagtggtgcgacgagtacttctacctcaagcacagaaacgagcagaggggaattggaggcctcttcttcgatgatctcaacaccccagatttcgaccgttgcttcgctttcatgcaggctgttggaaagggatacaccgatgcttacctccccatcgttgagagaagaaaggctatggcttacggcgagagagagaggaacttccaactttacagacgtggccgttacgttgagttcaaccttgtttgggataggggaacccttttcggacttcaaactggtggtaggaccgagtccatcctcatgtctatgccaccacttgttaggtgggagtacgactaccaacctaaggatggatctccagaggctgctctctccgagttcattaaggttagggattgggtgtga

SEQ ID NO: 232 - DNA, 732 bp, synthetic construct
  source 1..732: mol_type = other DNA
  misc_feature 1..732: note = Expression Cassette
atgactactgctgttactgctgctgtgtccttcccatctactaagaccaccagcctttccgccagatcctcctctgttatctccccagacaagatctcctacaagaaggtgcccctctactacagaaacgtgtcagctactggaaagatgggcccaatcagggctcagattgcttcctgctcatccatgaagaccctcatcttgttctccaccagggatggacagaccagagagatcgcttcttacctcgcctctgagcttaaagagcttggcattcaggctgacgttgcaaacgttcacaggatcgaagaaccacagtgggagaactacgatagggtggtgattggagcctccattaggtacggacattaccactctgccttccaagagttcgtgaagaagcacgctaccaggctcaactctatgccatccgctttctactccgtgaaccttgttgctaggaagccagagaagaggactccacagactaactcctacgcccgtaagttcctcatgaactctcaatggcgtccagataggtgcgctgttattgctggtgctttgagatacccaaggtacaggtggtacgaccgtttcatgatcaagctcattatgaagatgtccggcggagagactgacaccagaaaagaagttgtgtacaccgactgggagcaggttgcaaacttcgctagagagattgctcacctcaccgataagccaaccctcaagtaa

SEQ ID NO: 233 - DNA, 840 bp, synthetic construct
  source 1..840: mol_type = other DNA
  misc_feature 1..840: note = Expression Cassette
atggttattcagtctattacccacctctccccaaacctcgctttgccatctccactttctgtgtccaccaagaactacccagttgctgtgatgggcaacatctctgagagagaggaacctacctctgctaagagggttgcagttgttggagctggtgtttctggacttgctgctgcttacaagctcaagtcccacggactttcagtgacccttttcgaggctgattctagggctggtggaaagcttaagaccgtgaagaaggatggcttcatctgggatgagggtgccaacactatgaagaccctgatcttgttctccaccagggatggacagaccagagagattgcttcctacctcgcctctgagcttaaagagcttggaatccaggctgacgttgcaaacgttcacaggattgaggaaccacagtgggagaactacgatagggttgtgatcggagcctccattaggtacggacattaccactctgccttccaagagttcgttaagaagcacgctaccaggctcaactccatgccatctgctttctactccgtgaaccttgtggctaggaagccagagaagaggactccacagactaactcctacgcccgtaagttcctcatgaactctcaatggcgtccagataggtgcgctgttattgctggtgctcttagatacccaaggtacaggtggtacgaccgtttcatgatcaagctcatcatgaagatgtccggcggagagactgacaccagaaaagaagttgtgtacaccgactgggagcaggttgcaaacttcgctagggaaattgctcacctcaccgataagccaaccctcaagtaa

SEQ ID NO: 234 - DNA, 645 bp, synthetic construct
  source 1..645: mol_type = other DNA
  misc_feature 1..645: note = Expression Cassette
atggttattcagtctattacccacctctccccaaacctcgctttgccatctccactttctgtgtccaccaagaactacccagttgccgtgtgctcatccatgaagaccctcatcttgttctccaccagggatggacagaccagagagattgcttcctacctcgcctctgagcttaaagagcttggaatccaggctgacgttgcaaacgttcacaggattgaggaaccacagtgggagaactacgatagggttgtgatcggagcctccattaggtacggacattaccactctgccttccaagagttcgtgaagaagcacgctaccaggctcaactctatgccatccgctttctactccgtgaaccttgttgctaggaagccagagaagaggactccacagactaactcctacgcccgtaagttcctcatgaactctcaatggcgtccagataggtgcgctgttattgctggtgctcttagatacccaaggtacaggtggtacgaccgtttcatgatcaagctcattatgaagatgtccggcggagagactgacaccagaaaagaagttgtgtacaccgactgggagcaggttgcaaacttcgctagggaaattgctcacctcaccgataagccaaccctcaagtaa

SEQ ID NO: 235 - DNA, 867 bp, synthetic construct
  source 1..867: mol_type = other DNA
  misc_feature 1..867: note = Expression Cassette
atgcttacttcagctactactccctccagctcctctgcttcttctagagcttctaccaggttcgcctctagctcaagacctagaagaactgcttacgctaggggaagaaggcttaggccagttcttgctatggctgcttctgatgatccaagggctagatctgttgctgttgtgggagctggaatttccggacttgttgctgcttacaggctctccaagtctggtgttagggttaccgttttcgaggctgatgatagggctggcggaaagattaggaccaactccgattctggattcctctgggatgagggtgctaacaccatgaagaccctgatcttgttctccaccagggatggacagaccagagagattgcttcctacctcgcctctgagcttaaagagcttggaatccaggctgacgttgcaaacgttcacaggattgaggaaccacagtgggagaactacgatagggttgtgatcggcgcttccattaggtacggacattaccactctgccttccaagagttcgtgaagaagcacgctaccaggctcaactctatgccatccgctttctactccgtgaaccttgttgctaggaagccagagaagaggactccacagactaactcctacgcccgtaagttcctcatgaactctcaatggcgtccagataggtgcgctgttattgctggtgctcttagatacccaaggtacaggtggtacgaccgtttcatgatcaagctcatcatgaagatgtccggcggagagactgacaccagaaaagaagttgtgtacaccgactgggagcaggttgcaaacttcgctagggaaattgctcacctcaccgataagccaaccctcaagtaa

SEQ ID NO: 236 - DNA, 1590 bp, synthetic construct
  source 1..1590: mol_type = other DNA
  misc_feature 1..1590: note = Expression Cassette
atgactactgctgttactgctgctgtgtccttcccatctactaagaccaccagcctttccgccagatcctcctctgttatctccccagacaagatctcctacaagaaggtgcccctctactacagaaacgtgtcagctactggaaagatgggcccaatcagggctcagattgcttcctgctcatccatgtctacctccccattcaacccatctgctactgcttcaggtaggccaccaaagaccttcgctgttcttggagctggaattaccggacttaccgctgctcataggcttacccaacttggacataaggtgagggtgttcgagcagtctgatagggtgggaggatctatcaagaccgaagaggttgacggatggctcattgaaggtggaccaaacacccttttgtccggtgagcttgctgtggataagctcattgatgagttgggactcaacggcgagaggattgctgctgatccagctgctaagaaccgttacattgtgagaaggggaagggctcttgctgctccaatgtctcctccatctttcttcgcctcatccctgttctctccagtggctaagttcaagcttctcgctgagcttttcgctaggcgtagggttaggactaccgatgtttctcttgccgagttcgttgagtctcacttcggaagggaattcgtggattacgcccttaacccattcgtgggtggtgtttatgctggcgatccagagaagctttctgccaggcaatctttcccaaagctctgggagattgagcagacccacggatctcttatcaggggacaaattgctgcagccaaggctagaaaggctaggggagagccaagaccaggcatcttctcattcaagcacggacttcatgtgctccctgaagctttggctgctagacttccagctggtgctattacccttggagcttcccttgatgctattgtgccaggcgataagtggaacgttgtgtggcatgatgatgtggctacccacacccagtctttcgattctgttgttgtggctttgccagctccagctcttgctaggcttcaaattggaacccttggtgagaagccactcgctgctcttgctcttattgagcaccctccagtgtccagcttgttccttggattcagaagagagcaggttgcccacccacttgatggattcggagttcttgttccagccgttgagaagagatctgtgctcggagtgctgttctccagctcacttttcccaggtagggctccacttggtcatgttgctcttaccgttatggttggaggaactaggcaaccacagcttgcatctttgcctgctgatcagttgcttgctgctgttaggccagatcttacccagcttcttggagtgtctggtgatccagttttcgtgaggcataacttctggccaagggctatcccacagtacaaccttggacacgagcacttcattgctgctttggcagctggtgagagattccacccaggacttttcatgggaggacaagctagggatggaattgctgtgcctgcttgcattgctgccggtgaaaagcttgctgagagagctggacagtag

SEQ ID NO: 237 - DNA, 1596 bp, synthetic construct
  source 1..1596: mol_type = other DNA
  misc_feature 1..1596: note = Expression Cassette
atgactactgctgttactgctgctgtgtccttcccatctactaagaccaccagcctttccgccagatcctcctctgttatctccccagacaagatctcctacaagaaggtgcccctctactacagaaacgtgtcagctactggaaagatgggcccaatcagggctcagattgcttcctgttcttccatggcttccgtgggaattatcggagctggaattgctggacttaccgctgcttacgagcttcacagaaggggacttgaggttaccgttttcgaggctaccgataggatcggaggattcattcagtccgagaggatcgatggattcctcgttgaacttggaccacagactcttcagaggacctctggtgatttcgaggaacttctcaggcaagtggatctcgaggatgcttgcattccagctagaccagttgctgccaacagattcattgtgaggggaggacagccaatcccacttcctagatctccaagagagcttctcaggaccccacttctttcaccaagagctaggcttaggcttctcgctgagccattcattcatagggctcataggtccaccgaggaatcagttgctaagttcaccagaagaaggctcggaccagaggttctcgattaccttgttgagcctttcgtggctggaatcttcgctggtgatccagagcaactttctgtgaggtacgccttcccaaagctgttcgagcttgagcaacagtacggatcccttttctggggactcatcagggataggatgaagcagagataccacccagccccaagacgttccatgttctcattcgttgagggactccacatgcttccaagggctcttgctgagagacttccagctcatgctattgtgaggaacgctgaggtgttggctattaggtgggatgagaagaacccatggacccttactttcaggcaacacggaagggcttccaccagattcttcgatattatcgtgtgcgctgtgccactccataggcttgctcaacttaggattcacccaccagtggatagaaggccactttctactgttgagcacccaccaattgctcttgtggctcttggattcaggcgtgagcaagttgcacatccacttgatggattcggaatgcttgtgccagctgttgagagggacttccagattttgggaaccctcttcagctcctcactcttcccagatagggctccagagggacatgttcttttgaccactttcgtgggaggaatgaggcatccagagcttgctttgcttccagaggataggcttgaggctcttgtgttgcaggatcttagaaggctcctcggaatttctggtgctccagttttcaggcatgtttggaggtgggagagatccattccacagtacaggcttggatacgatgctgtgcttgcttgcgttcacgacgttgagatgtctaggtccggacttttcctcgctggcaactacatggaaggcatctctgtgattgatgctctccacaccggacttaaggctgctagggctattattcagcacctcagagaagaggctgctggtggacttgctaagcttgtgcttggagattga

SEQ ID NO: 238 - DNA, 1536 bp, synthetic construct
  source 1..1536: mol_type = other DNA
  misc_feature 1..1536: note = Expression Cassette
atggttattcagtctattacccacctctccccaaacctcgctttgccatctccactttctgtgtccaccaagaactacccagttgctgtgatgggcaacatctctgagagggaagaacctacctctatggcttccgtgggaattatcggagctggaattgctggacttaccgctgcttacgagcttcacagaaggggacttgaggttaccgttttcgaggctaccgataggatcggaggattcattcagtccgagaggatcgatggattcctcgttgaacttggaccacagactcttcagaggacctctggtgatttcgaggaacttctcaggcaagtggatctcgaggatgcttgcattccagctagacctgttgctgccaacagattcattgtgaggggaggacagccaatcccacttccaagatctccaagagagcttctcaggaccccacttctttcaccaagagctaggcttaggcttctcgctgagccattcattcatagggctcataggtccaccgaggaatcagttgctaagttcaccagaagaaggctcggaccagaggttctcgattaccttgttgagcctttcgtggctggaatcttcgctggtgatccagagcaattgtctgtgaggtacgccttcccaaagctgttcgagcttgagcaacagtacggatcccttttctggggactcatcagggataggatgaagcagagataccacccagccccaagacgttccatgttctcattcgttgagggactccacatgcttccaagggctcttgctgagagacttccagctcatgctattgtgaggaacgctgaggtgttggctattaggtgggatgagaagaacccatggacccttactttcaggcaacacggaagggcttccaccagattcttcgatattatcgtgtgcgctgtgccactccataggcttgctcaacttaggattcacccaccagtggatagaaggccactttctactgttgagcacccacctattgctcttgtggctcttggattcaggcgtgagcaagttgcacatccacttgatggattcggaatgcttgtgccagctgttgagagggatttccagattctcggaaccctcttcagctcctcacttttcccagatagggctccagagggacatgttcttttgaccactttcgtgggaggaatgaggcatccagagcttgctttgcttccagaggataggcttgaggctcttgtgttgcaggatcttagaaggctcctcggaatttctggtgctccagttttcaggcatgtttggaggtgggagagatccattccacagtacaggcttggatacgatgctgtgcttgcttgcgttcacgacgttgagatgtctaggtccggacttttcctcgctggcaactacatggaaggcatctctgtgattgatgctctccacaccggacttaaggctgctagggctattattcagcacctcagagaagaggctgctggtggacttgctaagcttgtgcttggagattga

SEQ ID NO: 239 - DNA, 1611 bp, synthetic construct
  source 1..1611: mol_type = other DNA
  misc_feature 1..1611: note = Expression Cassette
atgactactgctgttactgctgctgtgtccttcccatctactaagaccaccagcctttccgccagatcctcctctgttatctccccagacaagatctcctacaagaaggtgcccctctactacagaaacgtgtcagctactggaaagatgggcccaatcagggctcagattgcttcctgctcatctatgatggctggctacgattctgtggtgattggaggtggaattgctggacttgctgctgcttacacccttcacaagaggggatacagggttctcgttatcgagtctactaacagggtgggcggagtgattcaaaccattactactccagagggctacatcctcgattgcggaccaaacactgttggaactggtgatgctaggctctggcaagagcttattgatctcggactcagagagaggattaccccagctgctccatgctccaagaggcgtttcattctcattaacggcaccccagttgagatcccaacttctccagtgggccttatcactaccaggcttttgtcttggaggggcaagcttagagttctcgctgagccattcatcaacaggggttctactgatccagatgagtccgtggctgctttcttcaccagaagaattggagctgaggctaccgctcaccttttggatccattcgttgctggtgtgtacgctggtgatccacagagactttctaccgctgctgttttcccatctctttgggaggctgctcaaaggtccggatctattgtgaggggaatgctctctaagccaaagcccaagacccaagtgtctgagccaaagatgaggtctaggaccttcactttcaggggtggtcttgctgaatggccaagggctcttgctcaagctcttggtgctggaaacgtttggaccgagagaagggttgtgaagttgcagccaagagactcatggtgggaggtgaccattgatggtgttaacggaccagagactctcatctcccgttccctcattattgctacccctgctttcaccgccgctgatcttattgagtctgttgatcaaagggctgctggtgctttgaggggtattccatatgctccagttgctgtggtgcacctcggattcagaagggatcagatctcccaagagttgtccggattcggagttcttgctccatcttctgagcagaggcagttccttggaattctctggacctccagcatcttcccacatgttgctccacacgatcatgtgcttaccactaccctttccggtggtgctattagaccagagcttgctgaaaggtctgacgaaacccttatcgaggctgctattagggatcaccaccagcttctcggaattaggggacagccaattttcacccatgttaccagatggcgtaccgctattgctcagtacactttcggtcacagggaaaggattgctaccttggtgcaactcgagcaaaggctcccaactattcagttcgctggatcctacagggatggtgttggagttccaaagacttgggcttctggtgttcaagctggtgagagaattgctgcagctcttgctgctcatggaaccactgctgtttctaccgaaaccgcttctggatga

SEQ ID NO: 240 - protein, 212 aa, synthetic construct
  REGION 1..212: note = Expression Cassette
MTTAVTAAVSFPSTKTTSLSARSSSVISPDKISYKKVPLYYRNVSATGKMGPIRAQIASCSSMDAPSDAFLWVKALHIIAVVCWFAALFYLPRLYVYHAMSEDDTSHRRFEVMERKLYRGIMWPSMIATLITAHFLVDWGDATRHYHEALWFYIKVGLVGLLVIYHFVCGYYRKKLIGNAHYKSHKFWRYFNEMPTLILFAVVILVVVKPQF

SEQ ID NO: 241 - protein, 248 aa, synthetic construct
  REGION 1..248: note = Expression Cassette
MVIQSITHLSPNLALPSPLSVSTKNYPVAVMGNISEREEPTSAKRVAVVGAGVSGLAAAYKLKSHGLSVTLFEADSRAGGKLKTVKKDGFIWDEGANTMDAPSDAFLWVKALHIIAVVCWFAALFYLPRLYVYHAMSEDDTSHRRFEVMERKLYRGIMWPSMIATLITAHFLVDWGDATRHYHEALWFYIKVGLVGLLVIYHFVCGYYRKKLIGNAHYKSHKFWRYFNEMPTLILFAVVILVVVKPQF

SEQ ID NO: 242 - protein, 361 aa, synthetic construct
  REGION 1..361: note = Expression Cassette
MTTAVTAAVSFPSTKTTSLSARSSSVISPDKISYKKVPLYYRNVSATGKMGPIRAQIASCSSMKPDAHQVKQFLLNLQDTICQQLTAVDGAEFVEDSWQREAGGGGRSRVLRNGGVFEQAGVNFSHVHGEAMPASATAHRPELAGRSFEAMGVSLVVHPHNPYVPTSHANVRFFIAEKPGADPVWWFGGGFDLTPFYGFEEDAIHWHRTARDLCLPFGEDVYPRYKKWCDEYFYLKHRNEQRGIGGLFFDDLNTPDFDRCFAFMQAVGKGYTDAYLPIVERRKAMAYGERERNFQLYRRGRYVEFNLVWDRGTLFGLQTGGRTESILMSMPPLVRWEYDYQPKDGSPEAALSEFIKVRDWV

SEQ ID NO: 243 - protein, 397 aa, synthetic construct
  REGION 1..397: note = Expression Cassette
MVIQSITHLSPNLALPSPLSVSTKNYPVAVMGNISEREEPTSAKRVAVVGAGVSGLAAAYKLKSHGLSVTLFEADSRAGGKLKTVKKDGFIWDEGANTMKPDAHQVKQFLLNLQDTICQQLTAVDGAEFVEDSWQREAGGGGRSRVLRNGGVFEQAGVNFSHVHGEAMPASATAHRPELAGRSFEAMGVSLVVHPHNPYVPTSHANVRFFIAEKPGADPVWWFGGGFDLTPFYGFEEDAIHWHRTARDLCLPFGEDVYPRYKKWCDEYFYLKHRNEQRGIGGLFFDDLNTPDFDRCFAFMQAVGKGYTDAYLPIVERRKAMAYGERERNFQLYRRGRYVEFNLVWDRGTLFGLQTGGRTESILMSMPPLVRWEYDYQPKDGSPEAALSEFIKVRDWV

SEQ ID NO: 244 - protein, 332 aa, synthetic construct
  REGION 1..332: note = Expression Cassette
MVIQSITHLSPNLALPSPLSVSTKNYPVAVCSSMKPDAHQVKQFLLNLQDTICQQLTAVDGAEFVEDSWQREAGGGGRSRVLRNGGVFEQAGVNFSHVHGEAMPASATAHRPELAGRSFEAMGVSLVVHPHNPYVPTSHANVRFFIAEKPGADPVWWFGGGFDLTPFYGFEEDAIHWHRTARDLCLPFGEDVYPRYKKWCDEYFYLKHRNEQRGIGGLFFDDLNTPDFDRCFAFMQAVGKGYTDAYLPIVERRKAMAYGERERNFQLYRRGRYVEFNLVWDRGTLFGLQTGGRTESILMSMPPLVRWEYDYQPKDGSPEAALSEFIKVRDWV

SEQ ID NO: 245 - protein, 243 aa, synthetic construct
  REGION 1..243: note = Expression Cassette
MTTAVTAAVSFPSTKTTSLSARSSSVISPDKISYKKVPLYYRNVSATGKMGPIRAQIASCSSMKTLILFSTRDGQTREIASYLASELKELGIQADVANVHRIEEPQWENYDRVVIGASIRYGHYHSAFQEFVKKHATRLNSMPSAFYSVNLVARKPEKRTPQTNSYARKFLMNSQWRPDRCAVIAGALRYPRYRWYDRFMIKLIMKMSGGETDTRKEVVYTDWEQVANFAREIAHLTDKPTLK

SEQ ID NO: 246 - protein, 279 aa, synthetic construct
  REGION 1..279: note = Expression Cassette
MVIQSITHLSPNLALPSPLSVSTKNYPVAVMGNISEREEPTSAKRVAVVGAGVSGLAAAYKLKSHGLSVTLFEADSRAGGKLKTVKKDGFIWDEGANTMKTLILFSTRDGQTREIASYLASELKELGIQADVANVHRIEEPQWENYDRVVIGASIRYGHYHSAFQEFVKKHATRLNSMPSAFYSVNLVARKPEKRTPQTNSYARKFLMNSQWRPDRCAVIAGALRYPRYRWYDRFMIKLIMKMSGGETDTRKEVVYTDWEQVANFAREIAHLTDKPTLK

SEQ ID NO: 247 - protein, 214 aa, synthetic construct
  REGION 1..214: note = Expression Cassette
MVIQSITHLSPNLALPSPLSVSTKNYPVAVCSSMKTLILFSTRDGQTREIASYLASELKELGIQADVANVHRIEEPQWENYDRVVIGASIRYGHYHSAFQEFVKKHATRLNSMPSAFYSVNLVARKPEKRTPQTNSYARKFLMNSQWRPDRCAVIAGALRYPRYRWYDRFMIKLIMKMSGGETDTRKEVVYTDWEQVANFAREIAHLTDKPTLK

SEQ ID NO: 248 - protein, 288 aa, synthetic construct
  REGION 1..288: note = Expression Cassette
MLTSATTPSSSSASSRASTRFASSSRPRRTAYARGRRLRPVLAMAASDDPRARSVAVVGAGISGLVAAYRLSKSGVRVTVFEADDRAGGKIRTNSDSGFLWDEGANTMKTLILFSTRDGQTREIASYLASELKELGIQADVANVHRIEEPQWENYDRVVIGASIRYGHYHSAFQEFVKKHATRLNSMPSAFYSVNLVARKPEKRTPQTNSYARKFLMNSQWRPDRCAVIAGALRYPRYRWYDRFMIKLIMKMSGGETDTRKEVVYTDWEQVANFAREIAHLTDKPTLK

SEQ ID NO: 249 - protein, 529 aa, synthetic construct
  REGION 1..529: note = Expression Cassette
MTTAVTAAVSFPSTKTTSLSARSSSVISPDKISYKKVPLYYRNVSATGKMGPIRAQIASCSSMSTSPFNPSATASGRPPKTFAVLGAGITGLTAAHRLTQLGHKVRVFEQSDRVGGSIKTEEVDGWLIEGGPNTLLSGELAVDKLIDELGLNGERIAADPAAKNRYIVRRGRALAAPMSPPSFFASSLFSPVAKFKLLAELFARRRVRTTDVSLAEFVESHFGREFVDYALNPFVGGVYAGDPEKLSARQSFPKLWEIEQTHGSLIRGQIAAAKARKARGEPRPGIFSFKHGLHVLPEALAARLPAGAITLGASLDAIVPGDKWNVVWHDDVATHTQSFDSVVVALPAPALARLQIGTLGEKPLAALALIEHPPVSSLFLGFRREQVAHPLDGFGVLVPAVEKRSVLGVLFSSSLFPGRAPLGHVALTVMVGGTRQPQLASLPADQLLAAVRPDLTQLLGVSGDPVFVRHNFWPRAIPQYNLGHEHFIAALAAGERFHPGLFMGGQARDGIAVPACIAAGEKLAERAGQ

SEQ ID NO: 250 - protein, 565 aa, synthetic construct
  REGION 1..565: note = Expression Cassette
MVIQSITHLSPNLALPSPLSVSTKNYPVAVMGNISEREEPTSAKRVAVVGAGVSGLAAAYKLKSHGLSVTLFEADSRAGGKLKTVKKDGFIWDEGANTMSTSPFNPSATASGRPPKTFAVLGAGITGLTAAHRLTQLGHKVRVFEQSDRVGGSIKTEEVDGWLIEGGPNTLLSGELAVDKLIDELGLNGERIAADPAAKNRYIVRRGRALAAPMSPPSFFASSLFSPVAKFKLLAELFARRRVRTTDVSLAEFVESHFGREFVDYALNPFVGGVYAGDPEKLSARQSFPKLWEIEQTHGSLIRGQIAAAKARKARGEPRPGIFSFKHGLHVLPEALAARLPAGAITLGASLDAIVPGDKWNVVWHDDVATHTQSFDSVVVALPAPALARLQIGTLGEKPLAALALIEHPPVSSLFLGFRREQVAHPLDGFGVLVPAVEKRSVLGVLFSSSLFPGRAPLGHVALTVMVGGTRQPQLASLPADQLLAAVRPDLTQLLGVSGDPVFVRHNFWPRAIPQYNLGHEHFIAALAAGERFHPGLFMGGQARDGIAVPACIAAGEKLAERAGQ

SEQ ID NO: 251 - protein, 531 aa, synthetic construct
  REGION 1..531: note = Expression Cassette
MTTAVTAAVSFPSTKTTSLSARSSSVISPDKISYKKVPLYYRNVSATGKMGPIRAQIASCSSMASVGIIGAGIAGLTAAYELHRRGLEVTVFEATDRIGGFIQSERIDGFLVELGPQTLQRTSGDFEELLRQVDLEDACIPARPVAANRFIVRGGQPIPLPRSPRELLRTPLLSPRARLRLLAEPFIHRAHRSTEESVAKFTRRRLGPEVLDYLVEPFVAGIFAGDPEQLSVRYAFPKLFELEQQYGSLFWGLIRDRMKQRYHPAPRRSMFSFVEGLHMLPRALAERLPAHAIVRNAEVLAIRWDEKNPWTLTFRQHGRASTRFFDIIVCAVPLHRLAQLRIHPPVDRRPLSTVEHPPIALVALGFRREQVAHPLDGFGMLVPAVERDFQILGTLFSSSLFPDRAPEGHVLLTTFVGGMRHPELALLPEDRLEALVLQDLRRLLGISGAPVFRHVWRWERSIPQYRLGYDAVLACVHDVEMSRSGLFLAGNYMEGISVIDALHTGLKAARAIIQHLREEAAGGLAKLVLGD

SEQ ID NO: 252 - protein, 531 aa, synthetic construct
  REGION 1..531: note = Expression Cassette
MTTAVTAAVSFPSTKTTSLSARSSSVISPDKISYKKVPLYYRNVSATGKMGPIRAQIASCSSMASVGIIGAGIAGLTAAYELHRRGLEVTVFEATDRIGGFIQSERIDGFLVELGPQTLQRTSGDFEELLRQVDLEDACIPARPVAANRFIVRGGQPIPLPRSPRELLRTPLLSPRARLRLLAEPFIHRAHRSTEESVAKFTRRRLGPEVLDYLVEPFVAGIFAGDPEQLSVRYAFPKLFELEQQYGSLFWGLIRDRMKQRYHPAPRRSMFSFVEGLHMLPRALAERLPAHAIVRNAEVLAIRWDEKNPWTLTFRQHGRASTRFFDIIVCAVPLHRLAQLRIHPPVDRRPLSTVEHPPIALVALGFRREQVAHPLDGFGMLVPAVERDFQILGTLFSSSLFPDRAPEGHVLLTTVVGGMRHPELALLPEDRLEALVLQDLRRLLGISGAPVFRHVWRWERSIPQYRLGYDAVLACVHDVEMSRSGLFLAGNYMEGISVIDALHTGLKAARAIIQHLREEAAGGLAKLVLGD

SEQ ID NO: 253 - protein, 567 aa, synthetic construct
  REGION 1..567: note = Expression Cassette
MVIQSITHLSPNLALPSPLSVSTKNYPVAVMGNISEREEPTSAKRVAVVGAGVSGLAAAYKLKSHGLSVTLFEADSRAGGKLKTVKKDGFIWDEGANTMASVGIIGAGIAGLTAAYELHRRGLEVTVFEATDRIGGFIQSERIDGFLVELGPQTLQRTSGDFEELLRQVDLEDACIPARPVAANRFIVRGGQPIPLPRSPRELLRTPLLSPRARLRLLAEPFIHRAHRSTEESVAKFTRRRLGPEVLDYLVEPFVAGIFAGDPEQLSVRYAFPKLFELEQQYGSLFWGLIRDRMKQRYHPAPRRSMFSFVEGLHMLPRALAERLPAHAIVRNAEVLAIRWDEKNPWTLTFRQHGRASTRFFDIIVCAVPLHRLAQLRIHPPVDRRPLSTVEHPPIALVALGFRREQVAHPLDGFGMLVPAVERDFQILGTLFSSSLFPDRAPEGHVLLTTFVGGMRHPELALLPEDRLEALVLQDLRRLLGISGAPVFRHVWRWERSIPQYRLGYDAVLACVHDVEMSRSGLFLAGNYMEGISVIDALHTGLKAARAIIQHLREEAAGGLAKLVLGD

SEQ ID NO: 254 - protein, 567 aa, synthetic construct
  REGION 1..567: note = Expression Cassette
MVIQSITHLSPNLALPSPLSVSTKNYPVAVMGNISEREEPTSAKRVAVVGAGVSGLAAAYKLKSHGLSVTLFEADSRAGGKLKTVKKDGFIWDEGANTMASVGIIGAGIAGLTAAYELHRRGLEVTVFEATDRIGGFIQSERIDGFLVELGPQTLQRTSGDFEELLRQVDLEDACIPARPVAANRFIVRGGQPIPLPRSPRELLRTPLLSPRARLRLLAEPFIHRAHRSTEESVAKFTRRRLGPEVLDYLVEPFVAGIFAGDPEQLSVRYAFPKLFELEQQYGSLFWGLIRDRMKQRYHPAPRRSMFSFVEGLHMLPRALAERLPAHAIVRNAEVLAIRWDEKNPWTLTFRQHGRASTRFFDIIVCAVPLHRLAQLRIHPPVDRRPLSTVEHPPIALVALGFRREQVAHPLDGFGMLVPAVERDFQILGTLFSSSLFPDRAPEGHVLLTTVVGGMRHPELALLPEDRLEALVLQDLRRLLGISGAPVFRHVWRWERSIPQYRLGYDAVLACVHDVEMSRSGLFLAGNYMEGISVIDALHTGLKAARAIIQHLREEAAGGLAKLVLGD

SEQ ID NO: 255 - protein, 511 aa, synthetic construct
  REGION 1..511: note = Expression Cassette
MVIQSITHLSPNLALPSPLSVSTKNYPVAVMGNISEREEPTSMASVGIIGAGIAGLTAAYELHRRGLEVTVFEATDRIGGFIQSERIDGFLVELGPQTLQRTSGDFEELLRQVDLEDACIPARPVAANRFIVRGGQPIPLPRSPRELLRTPLLSPRARLRLLAEPFIHRAHRSTEESVAKFTRRRLGPEVLDYLVEPFVAGIFAGDPEQLSVRYAFPKLFELEQQYGSLFWGLIRDRMKQRYHPAPRRSMFSFVEGLHMLPRALAERLPAHAIVRNAEVLAIRWDEKNPWTLTFRQHGRASTRFFDIIVCAVPLHRLAQLRIHPPVDRRPLSTVEHPPIALVALGFRREQVAHPLDGFGMLVPAVERDFQILGTLFSSSLFPDRAPEGHVLLTTFVGGMRHPELALLPEDRLEALVLQDLRRLLGISGAPVFRHVWRWERSIPQYRLGYDAVLACVHDVEMSRSGLFLAGNYMEGISVIDALHTGLKAARAIIQHLREEAAGGLAKLVLGD

SEQ ID NO: 256 - protein, 536 aa, synthetic construct
  REGION 1..536: note = Expression Cassette
MTTAVTAAVSFPSTKTTSLSARSSSVISPDKISYKKVPLYYRNVSATGKMGPIRAQIASCSSMMAGYDSVVIGGGIAGLAAAYTLHKRGYRVLVIESTNRVGGVIQTITTPEGYILDCGPNTVGTGDARLWQELIDLGLRERITPAAPCSKRRFILINGTPVEIPTSPVGLITTRLLSWRGKLRVLAEPFINRGSTDPDESVAAFFTRRIGAEATAHLLDPFVAGVYAGDPQRLSTAAVFPSLWEAAQRSGSIVRGMLSKPKPKTQVSEPKMRSRTFTFRGGLAEWPRALAQALGAGNVWTERRVVKLQPRDSWWEVTIDGVNGPETLISRSLIIATPAFTAADLIESVDQRAAGALRGIPYAPVAVVHLGFRRDQISQELSGFGVLAPSSEQRQFLGILWTSSIFPHVAPHDHVLTTTLSGGAIRPELAERSDETLIEAAIRDHHQLLGIRGQPIFTHVTRWRTAIAQYTFGHRERIATLVQLEQRLPTIQFAGSYRDGVGVPKTWASGVQAGERIAAALAAHGTTAVSTETASG

SEQ ID NO: 257 - protein, 572 aa, synthetic construct
  REGION 1..572: note = Expression Cassette
MVIQSITHLSPNLALPSPLSVSTKNYPVAVMGNISEREEPTSAKRVAVVGAGVSGLAAAYKLKSHGLSVTLFEADSRAGGKLKTVKKDGFIWDEGANTMMAGYDSVVIGGGIAGLAAAYTLHKRGYRVLVIESTNRVGGVIQTITTPEGYILDCGPNTVGTGDARLWQELIDLGLRERITPAAPCSKRRFILINGTPVEIPTSPVGLITTRLLSWRGKLRVLAEPFINRGSTDPDESVAAFFTRRIGAEATAHLLDPFVAGVYAGDPQRLSTAAVFPSLWEAAQRSGSIVRGMLSKPKPKTQVSEPKMRSRTFTFRGGLAEWPRALAQALGAGNVWTERRVVKLQPRDSWWEVTIDGVNGPETLISRSLIIATPAFTAADLIESVDQRAAGALRGIPYAPVAVVHLGFRRDQISQELSGFGVLAPSSEQRQFLGILWTSSIFPHVAPHDHVLTTTLSGGAIRPELAERSDETLIEAAIRDHHQLLGIRGQPIFTHVTRWRTAIAQYTFGHRERIATLVQLEQRLPTIQFAGSYRDGVGVPKTWASGVQAGERIAAALAAHGTTAVSTETASG

SEQ ID NO: 258 - protein, 543 aa, synthetic construct
  REGION 1..543: note = Expression Cassette
MLTSATTPSSSSASSRASTRFASSSRPRRTAYARGRRLRPVLAMAASDDPRARSVAVVGAGISGLVAAYRLSKSGVRVTVFEADDRAGGKIRTNSDSGFLWDEGANTMTESEAEVSSLIDDLGLREKQQLPISQNKMYIARDGLPVLLPSNPAALLTSNILSAKSKLQIMLEPFLWRKHNATELSDEHVQESVGEFFERHFGKEFVDYVIDPFVAGTCGGDPQSLSMHHTFPEVWNIEKRFGSVFAGLIQSTLLSKKEKGGENASIKKPRVRGSFSFQGGMQTLVDTMCKQLGEDELKLQCEVLSLSYNQKGIPSLGNWSVSSMSNNTSEDQSYDAVVVTAPIRNVKEMKIMKFGNPFSLDFIPEVTYVPLSVMITAFKKDKVKRPLEGFGVLIPSKEQHNGLKTLGTLFSSMMFPDRAPSDMCLFTTIVGGSRNRKLANASTDELKQIVSSDLQQLLGTEDEPSFVNHLFWSNAFPLYGHNYDSVLRAIDKMEKDLPGFFYAGNHKGGLSVGKAMASGCKAAELVISYLDSHIYVKMDEKTA

SEQ ID NO: 259 - protein, 560 aa, synthetic construct
  REGION 1..560: note = Expression Cassette
MVIQSITHLSPNLALPSPLSVSTKNYPVAVMGNISEREEPTSAKRVAVVGAGVSGLAAAYKLKSHGLSVTLFEADSRAGGKLKTVKKDGFIWDEGANTATKHPDAAPNLIVTEAKDRVGGNIITREENGFLWEEGPNSFQPSDPMLTMVVDSGLKDDLVLGDPTAPRFVLWNGKLRPVPSKLTDLPFFDLMSIGGKIRAGFGALGIRPSPPGREESVEEFVRRNLGDEVFERLIEPFCSGVYAGDPSKLSMKAAFGKVWKLEQNGGSIIGGTFKAIQERKNAPKAERDPRLPKPQGQTVGSFRKGLRMLPEAISARLGSKVKLSWKLSGITKLESGGYNLTYETPDGLVSVQSKSVVMTVPSHVASGLLRPLSESAANALSKLYYPPVAAVSISYPKEAIRTECLIDGELKGFGQLHPRTQGVETLGTIYSSSLFPNRAPPGRILLLNYIGGSTNTGILSKSEGELVEAVDRDLRKMLIKPNSTDPLKLGVRVWPQAIPQFLVGHFDILDTAKSSLTSSGYEGLFLGGNYVAGVALGRCVEGAYETAIEVNNFMSRYAYK

SEQ ID NO: 260 - protein, 560 aa, synthetic construct
  REGION 1..560: note = Expression Cassette
MVIQSITHLSPNLALPSPLSVSTKNYPVAVMGNISEREEPTSAKRVAVVGAGVSGLAAAYKLKSHGLSVTLFEADSRAGGKLKTVKKDGFIWDEGANTATKHPDAAPNLIVTEAKDRVGGNIITREENGFLWEEGPNSFQPSDPMLTMVVDSGLKDDLVLGDPTAPRFVLWNGKLRPVPSKLTDLPFFDLMSIGGKIRAGFGALGIRPSPPGREESVEEFVRRNLGDEVFERLIEPFCSGVYAGDPSKLSMKAAFGKVWKLEQNGGSIIGGTFKAIQERKNAPKAERDPRLPKPQGQTVGSFRKGLRMLPEAISARLGSKVKLSWKLLGITKLESGGYNLTYETPDGLVSVQSKSVVMTVPSHVASGLLRPLSESAANALSKLYYPPVAAVSISYPKEAIRTECLIDGELKGFGQLHPRTQGVETLGTIYSSSLFPNRAPPGRILLLNMIGGSTNTGILSKSEGELVEAVDRDLRKMLIKPNSTDPLKLGVRVWPQAIPQFLVGHFDILDTAKSSLTSSGYEGLFLGGNYVAGVALGRCVEGAYETAIEVNNFMSRYAYK

SEQ ID NO: 261 - protein, 538 aa, synthetic construct
  REGION 1..538: note = Expression Cassette
MVIQSITHLSPNLALPSPLSVSTKNYPVAVMGNISEREEPTSAKRVAVVGAGVSGLAAAYKLKSHGLSVTLFEADSRAGGKLKTVKKDGFIWDEGANTMTESALEASRLIDDLGLEDRLQYPNSQHKRYTVKDGAPALIPSDPIALMKSSLLSTKSKFKLFLEPFLYDKSSTKSSKKVSDEHISESVGSFFERHFGKEVVDYLIDPFVAGTSAGDPESLSIRHAFPGLWNLEKKYGSIIVGAIMSKLTAKGDKKGSAVSGKGRNKRASFSFHGGMQTLVDALHKEVGDGNVKLGAQVLSLACICDGLSASDGWSISVDSKDASNKELTKNHSFDAVIMTAPLSNVQRMKFTKGGAPFVLDFLPKVDYLPLSLMVTAFKKEDVKRPLEGFGVLIPYKEQQKHGLKTLGTLFSSMMFPDRAPNDQHLFTTFVGGSHNRDLAGAPTSILKQLVTSDLGKLLGVEGQPTFVKHIHWRNAFPLYGHDYDSALEAIGKMESDLPGFFYAGNNKDGLAVGNVIASGSKTADLVISYLESGIKQDN

SEQ ID NO: 262 - protein, 538 aa, synthetic construct
  REGION 1..538: note = Expression Cassette
MVIQSITHLSPNLALPSPLSVSTKNYPVAVMGNISEREEPTSAKRVAVVGAGVSGLAAAYKLKSHGLSVTLFEADSRAGGKLKTVKKDGFIWDEGANTMTESALEASRLIDDLGLEDRLQYPNSQHKRYTVKDGAPALIPSDPIALMKSSLLSTKSKFKLFLEPFLYDKSSTKSSKKVSDEHISESVGSFFERHFGKEVVDYLIDPFVAGTSAGDPESLSIRHAFPGLWNLEKKYGSIIVGAIMSKLTAKGDKKGSAVSGKGRNKRASFSFHGGMQTLVDALHKEVGDGNVKLGAQVLSLACICDGLSASDGWSISVDSKDASNKELTKNHSFDAVIMTAPLSNVQRMKFTKGGAPFVLDFLPKVDYLPLSLMVTAFKKEDVKRPLEGFGVLIPYKEQQKHGLKTLGTLFSSMMFPDRAPNDQHLFTTIVGGSHNRDLAGAPTSILKQLVTSDLGKLLGVEGQPTFVKHIHWRNAFPLYGHDYDSALEAIGKMESDLPGFFYAGNNKDGLAVGNVIASGSKTADLVISYLESGIKQDN

SEQ ID NO: 263 - DNA, 1491 bp, synthetic construct
  source 1..1491: mol_type = other DNA
  misc_feature 1..1491: note = Expression Cassette
atggttattcagtctattacccacctctccccaaacctcgctttgccatctccactttctgtgtccaccaagaactacccagttgctgtgatgggcaacatctctgagagagaggaacctacctctgctaagagggttgcagttgttggagctggtgtttctggacttgctgctgcttacaagctcaagtcccacggactttcagtgacccttttcgaggctgattctagggctggtggaaagcttaagaccgtgaagaaggatggcttcatctgggatgagggtgccaacactatgctaaaagtgttattgctctttgtgttgctgattgcggggatcgtggttggcccgatgattgccggccatcagggttatgtgctgatccagaccgacaactacaatatcgaaaccagcgtcacgggcctggcgatcatattgattctggcgatggtagtgctgtttgccattgagtggctactgcggcggatcttccgcactggcgcgcacacccgtgggtggtttgtcggacgtaagcgtcgccgtgcacgtaagcagaccgaacaggcgctgctgaaactggcggaaggcgattatcagcaagttgaaaagctgatggcgaaaaatgccgatcacgcggaacaaccggtggtgaactatctactggctgccgaagccgcgcaacaacgtggtgatgaagcacgcgccaaccaacatctggaacgcgcagcggagctggccggcaacgacaccattccggtagaaatcacccgcgtacgtctgcaactggcccgtaatgaaaaccatgctgcacgccacggcgtggataagctgctggaagttacgccacgccatccggaagtattacgtctggcggaacaggcgtatatccgcacaggtgcatggagttcgctgctggatattatcccatcaatggcgaaagcccatgttggtgatgaagaacatcgtgcaatgctggaacaacaggcatggattggcctgatggatcaggcgcgtgccgataacggtagcgaaggtttgcgtaactggtggaaaaaccaaagccggaaaacgcgtcatcaggtagcgttgcaggtggcaatggcggaacatcttattgaatgtgacgatcatgatactgcccagcaaattatcatcgatggcctgaaacgccagtacgacgatcgcctactgctgccgattcctcgactgaaaacaaacaatccggaacagctggaaaaagtgctgcgccagcaaatcaaaaacgtcggcgatcgcccgctgttgtggagcacactgggccagtcactgatgaagcacggagaatggcaggaagcatcgctcgccttccgcgcagcgctgaaacaacgtccggacgcctacgattacgcatggcttgccgacgcgctggacagactgcacaagccggaagaagctgcagctatgcgtcgcgacggtttgatgttaacgttgcagaataacccgccacagtag

SEQ ID NO: 264 - protein, 496 aa, synthetic construct
  REGION 1..496: note = Expression Cassette
MVIQSITHLSPNLALPSPLSVSTKNYPVAVMGNISEREEPTSAKRVAVVGAGVSGLAAAYKLKSHGLSVTLFEADSRAGGKLKTVKKDGFIWDEGANTMLKVLLLFVLLIAGIVVGPMIAGHQGYVLIQTDNYNIETSVTGLAIILILAMVVLFAIEWLLRRIFRTGAHTRGWFVGRKRRRARKQTEQALLKLAEGDYQQVEKLMAKNADHAEQPVVNYLLAAEAAQQRGDEARANQHLERAAELAGNDTIPVEITRVRLQLARNENHAARHGVDKLLEVTPRHPEVLRLAEQAYIRTGAWSSLLDIIPSMAKAHVGDEEHRAMLEQQAWIGLMDQARADNGSEGLRNWWKNQSRKTRHQVALQVAMAEHLIECDDHDTAQQIIIDGLKRQYDDRLLLPIPRLKTNNPEQLEKVLRQQIKNVGDRPLLWSTLGQSLMKHGEWQEASLAFRAALKQRPDAYDYAWLADALDRLHKPEEAAAMRRDGLMLTLQNNPPQ

SEQ ID NO: 265 - protein, 534 aa, Amaranthus sp.; identical to SEQ ID NO: 1

SEQ ID NO: 266 - protein, 461 aa, Salinibacter sp.; identical to SEQ ID NO: 53

SEQ ID NO: 267 - protein, 469 aa, Rhodothermus sp.; identical to SEQ ID NO: 51

SEQ ID NO: 268 - protein, 461 aa, Salinibacter sp.; identical to SEQ ID NO: 52

SEQ ID NO: 269 - protein, 469 aa, Rhodothermus sp.; identical to SEQ ID NO: 55

SEQ ID NO: 270 - protein, 472 aa, Halothiobacillus sp.; identical to SEQ ID NO: 64

SEQ ID NO: 271 - protein, 441 aa, Coralibacter sp.; identical to SEQ ID NO: 68

SEQ ID NO: 272 - protein, 463 aa, Magnetococcus sp.
MTKNPILIIGGGISGLSTAWFLHKKGEKVILLESRDRVGGNIRTSRNPEGYLIEHGPNSTLQKPGDEEDALGRIITDMALESELQEANPLAARRFVMKGGQLHVLPTSPPGFIKTPLFSLSAKLRLCLEPFIGKSEQEESIAQFVIRRLGQEFLDYAIEPFVSGVYAGDPKQLSVRAAVAKIYALEAKYGSLIKGAIALGKIRKAAGMPRGRMISFETGMETLPATIANRLPHQSIHTNAQVTALCQHGAAWQVSWQQGGQHGGEPHSIIASQVVLATPASVSAQLLRPLSPQAADLLESIRYAPVDSVALGYAKQDINHSLDGFGFLIPRKEQVTTLGGLFSTTLFPGRAPQDKALLTCFIGGMTNPSITQWSEEKVVTQVDQDMMAALGIQHGAEYVHLTRYTHAIAQYEQGHLQRVGDIDRALAGYKGLHLRANWRDGVSVSDCVLNGEKSAQKILAGVS

SEQ ID NO: 273 - protein, 467 aa, Opitutus sp.; identical to SEQ ID NO: 57

SEQ ID NO: 274 - protein, 451 aa, Melioribacter sp.; identical to SEQ ID NO: 63

SEQ ID NO: 275 - protein, 501 aa, Physcomitrella sp.
VAVVGAGVSGLAAAHRLRSAGVAVTVFEAQNAVGGKIQSFSNDGLIWEQGPNTMVETEPEVSSLIDELGLREKQQWPVMQNKRYVVRDGKAVQLPSNPLGLITTKLLSAQAKCQILLEPFLWKRKEVPLKEAANGRENVGNFITRHFGREVVDYLVDPFIAGTSGSDPDSVSIRHTFPDLFAIEERYGSLLIGGVKSSFKKKSGSKKESFKVQSDSAKVTPAQKRPRGSFSFVGGMQTLAHALSERLDEESLELNSSVLNLASDQQGNPSRNNWTVTYKKENSQQKEKHFDAVILTTPLHNLQELGIEKNGIPYALDFIPEIVYQPMSVIVTAFKESDVKNSLKGFGVLVPRMEKKNGFFTLGTMFSSSMFPDRAPPGQVVFTTFVGGSRNRALASAPFEEVKAVALEDLRKIVGVQGPPVAVKHIFWKQAFPQYSLDYNEFLSSLEKMESDLPGLFYAGNHRGGLSVGKSVASGCKAAEHVLSMLEGTGGRKIFTMASTK

SEQ ID NO: 276 - protein, 511 aa, Ricinus sp.; identical to SEQ ID NO: 9
  source 1..511: note = Ricinus (angiosperm)

SEQ ID NO: 277 - protein, 476 aa, Chromohalobacter sp.
MQHEEQLDATDQAVGEARRDVVVVGGGASGLAAARAAARRGLAVSVLERGSHAGGNLRTHRDGAWQVEVGPNTLVMKPPLHTLLDELGLLDEAQPANPDARRRYIAFHGRPVALPTHVLKAPANPLIGLRGSWSVLREPFRAGPPRDEESLADFVVRRLGRHVLDHLVDPFVSGVYAGDPARLSAQAAMPRLVALEREYGSLVRGGLRRLRQSRREPPALPREWRGQLVSFPAGLQRLAERLAEDIADQPGASVQCGCEVVAVGREADGWQVETAAGQRIRTRELVLAVPAPTAAALLAPLDAALAAPLEEIAYPPVNAVSVGFRRADVDHPLDGFGMLIPGVERRRTLGALFSSTLFPGRAPSDHVLLTAFLGGRRQPEAAAGDDAEQVAQVVADLGDLLGIHAEPVWQCVSRWPQAIPQYERGHLARIAALDAALEAHPGLSLLGNWRDGIAVGDCLENGRRLGERLAETPDRR

SEQ ID NO: 278 - protein, 462 aa, Leptospirillum sp.; identical to SEQ ID NO: 75

SEQ ID NO: 279 - protein, 514 aa, Selaginella sp.; identical to SEQ ID NO: 44

SEQ ID NO: 280 - protein, 520 aa, Selaginella sp.; identical to SEQ ID NO: 43

SEQ ID NO: 281 - protein, 508 aa, Arabidopsis sp.; identical to SEQ ID NO: 22

SEQ ID NO: 282 - protein, 454 aa, Acidithiobacillus sp.
MSSETVIVVGAGLTGLSATWYLHQRGIPALLLEAEAEVGGNLRSRSEDGFLRDLGPNSLMIKGDLLPDLIRQLQLEDRVVEANPLARRRFVLNRRGHPVALGPDVLFSSSLLSLSARLRLLSEPWRPRRPQSQNDESIADFVRRRLGPEALTWMVDPFVSGVFAGDPEKLSVTAALPRLAAMEAESGSLLRAALRRRRAGKKEGSSRLVSFRGGLQELPRALAARLPPDRLALSRPLTHLQRRGELWHLQTPAGDLECRRLVLALPAAESARLLRAEAPELAAELEAIVYPAVATVALGFPREAVDHRLDGFGLLIPRRLGIETLGVLFSSTLFPERAPPGMVLLTAFLGGAQQDISGRSPAELEAQALADLRPILGIRGDPAYHRCALWPRAIPQYALGHRQRVERIHELRRQLAGLELLGNWQGGVALGDCVVQADAFQRTFAQVDTATGPS

SEQ ID NO: 283 - protein, 512 aa, Arabidopsis sp.; identical to SEQ ID NO: 23

SEQ ID NO: 284 - protein, 502 aa, Glycine sp.; identical to SEQ ID NO: 11

SEQ ID NO: 285 - protein, 474 aa, Chloroflexus sp.; identical to SEQ ID NO: 73

SEQ ID NO: 286 - protein, 499 aa, Medicago sp.; identical to SEQ ID NO: 13

SEQ ID NO: 287 - protein, 475 aa, Chloroflexus sp.; identical to SEQ ID NO: 77

SEQ ID NO: 288 - protein, 508 aa, Vitis sp.; identical to SEQ ID NO: 8

SEQ ID NO: 289 - protein, 544 aa, Zea sp.; identical to SEQ ID NO: 31

SEQ ID NO: 290 - protein, 478 aa, Arabidopsis sp.
MASGAVADHQIEAVSGKRVAVVGAGVSGLAAAYKLKSRGLNVTVFEADGRVGGKLRSVMQNGLIWDEGANTMTEAEPEVGSLLDDLGLREKQQFPISQKKRYIVRNGVPVMKKSSKVSDASAEESVSEFFQRHFGQEVVDYLIDPFVGGTSAADPDSLSMKHSFPDLWNVEKSFGSIIVGAIRTKFAAKGGKSRDTKSSPGTKKGSRGSFSFKGGMQILPDTLCKSLSHDEINLDSKVLSLSYNSGSRQENWSLSCVSHNETQRQNPHYDAVIMTAPLCNVKEMKVMKGGQPFQLNFLPEINYMPLSVLITTFTKEKVKRPLEGFGVLIPSKEQKHGFKTLGTLFSSMMFPDRSPSDVHLYTTFIGGSRNQELAKASTDELKQVVTSDLQRLLGVEGEPVSVNHYYWRKAFPLYDSSYDSVMEAIDKMENDLPGFFYAGNHRGGLSVGKSIASGCKAADLVISYLESCSNDKKPNDSL

SEQ ID NO: 291 - protein, 441 aa, Hydrogenobacter sp.
MIDVAVVGAGISGLSIAYHLKKAGLEVKVFEKEDAVGGNIQTAYIDGYVCELGPQTILADSKVEEFLKDAGIKPIYANPSSKKRYIYRKGKLVALPLSPVEFLLSPFLSLGGKLRVLKEPFVPRSPKQEESIAEFVRRRFGREFLDYVVAPFVSGVYAGDPEELSVKYAVRKVYELEQKYGSVIKGAIKLKALGPSGKLISFEGGNATLIRKLSESLEVHKENVVLRIRRKDDIFILDTKEGKVTAKAVVVSTPATSTGYLLRDLSWSISEEFDKIYYAPVLVVHVAVKFGVLPEGFGFLVPKKENKRILGVIFSSNLFEGRSPEGKSLITVYIGGATDPEIIEYEDEAIVSVLERELRETVDIRDWDLLKITRWKKGIPQYTVGYGRYLELANSIEMEQPGLFLSGNYLYGVSVADCIRVSHHIAKRVIDFLEVKGRTVV

SEQ ID NO: 292 - protein, 458 aa, Thermovibrio sp.; identical to SEQ ID NO: 97

SEQ ID NO: 293 - protein, 462 aa, Ignavibacterium sp.; identical to SEQ ID NO: 59

SEQ ID NO: 294 - protein, 544 aa, Sorghum sp.; identical to SEQ ID NO: 28
  source 1..544: note = Sorghum (genus)

SEQ ID NO: 295 - protein, 456 aa, Desulfurobacterium sp.; identical to SEQ ID NO: 78

SEQ ID NO: 296 - protein, 446 aa, Acidithiobacillus sp.; identical to SEQ ID NO: 95

SEQ ID NO: 297 - protein, 433 aa, Thermocrinis sp.
MMDVIVVGAGISGLSVAFRLSKEGLKVKVLEKEEEPGGNIRTRKVGDFLCELGPQTVLADGEVVDFFREVGIQPQEASPSSSVRYIYKRGKLIPLPNSPVKFLTSPLLSLGGKLRVLMEPFVAPSVKTEETVAQFVRRRLGEEFLHYVITPFVRGVYAGDPEELSIKYAFRRVYQLEREYGSLIRAAIKLKRLGPPGKIISFEGGNQSIIQQLASYVDLETENVALRIRRKDDRYILDTKEGKYEARCVVVASPATSAGYLLRDISWSAAQELDKIYYAPVVVVHVATSQNIPDGFGFLAPQKEDLRILGVLFSSRIFPNKAPQGKELLTIYMGGATDPEVVEYEDELIMRIVEEDLRKSLGLTQLEFLLVTRWKRAIPQYTLGYGRYIELVEALQRENPGLFITGNYLEGVSVADCIKRSKRVVQEVVKFFR

SEQ ID NO: 298 - protein, 440 aa, Laribacter sp.
MVVVIGAGISGLSCAWHLQQRGIPVVVLEAGSRVGGKIGTVAADGYRLELGPNTLYGHAGHLDLLERLGLTAAIRPAAAVVRHRFVLRGDRYEALPSGPLSFLTGSQFGARSKWLALTEPFRRNRPVREPETVAAFFRRRLGDEFVERAISPFVGGIFAGDPEELVAGLTLPVIHEAERQSGSIVRGMFARRKTFRRKATFTLNEGLQQLPETLAQGLDVRLDTSVQALERLETGWRVRTPAGELDADEVVLAVPADVAGQLLASHFPAIAANLANVTYAPVAVLHTAWPRSTVGHDLDGFGGLNPKVEKPFAAGSIWSGSLFPDRTPAGETLLTTFVGGMQFLDRYRHDDATLVALALEELRRLYRIQGEPTLCRLTRQEQAIPQYDSHALPLASAVSDLHEHGIRVCANWHGGVSVVDCLDKGQQVAVQCLLDYPPAS

SEQ ID NO: 299 - protein, 446 aa, Acidithiobacillus sp.
MEEVIIIGGGISGLATAYFLRKRGWSPLLLEAGAAPGGNLQSRQEEGYLRDMGPNSLMLKGRIVPEWLRELQLEGDIVEANPLAGRRYVLNRHRQPVALGPGVLFGGGLLSIRGRLRLLGEPFQPPHPTPDGEESIADFVRRRLGDEALTWLVDPFVSGVFAGNPARLSVQATLPRLAALEQDGGSLLRGALRARKKKLPGTPKTRLVSFREGLQVLPLRVANTLGDTLRCDTPVDQLAYSGDMWQVGSGNQTWQSKRLVLALPAGAAARLLAQTDATLARELDAIPYPAVGSLSIGFRRPQVEHPLDGFGMLIPRVMGLETLGVLFSSTLFPGRAPAGQVLLTAFIGGSQNVLAGRDDDDLLATVLREIGPLLGISGDPVFSRCRVWPKAIPQYEIGHLDRMKRIDTLSAGHPGLHFRANWQGGVALGDCIEQAWEFSQTADWQH

SEQ ID NO: 300 - protein, 453 aa, Deferribacter sp.
MKIAIIGGGISGISTAFWLEYFAKERLKSIDITIFEKNKRLGGTINTFYKDNFIIESGPNGFLDSKPYTVETFEKAGLGDNLIRSNELAKKRYIMRGGVLHKLPEKPNEFFSSKLLSFKGKLRVISELFIPAKKDEYDETIEEFAYRRLGKEAADYLISPMVSGVFAGDPSKLSLKSCFPVIYNLEKEYGGLFKAMFKKKGKKSGPAGPGGNLTSYKGGLIKGINALTEQLSNTKIYLGEEVTGLDKTNGSFKVKTTNSCDNYDIVIITSPAYVAAEFIKGLSVELSDKLLKLNYAPMYVIGFGFKEEDVLDPLDGFGFLVPHNENRKILGALFTSSIFPERAPKGYKLIRVMIGGDKNRWVLNCSEDELRDIAFNEIKDILGVKGNSVVEKSFYWERAIPQYYQGHEKLVEDIESICMDINNIYIGGNLLYGIGINDCTKRSIDIARGVLGG

SEQ ID NO: 301 - protein, 471 aa, Geobacter sp.; identical to SEQ ID NO: 94

SEQ ID NO: 302 - protein, 450 aa, Thermodesulfovibrio sp.
MGSAEIVIVGGGISGLSLAYFLIQKNSQLNIKIVEAEKRAGGKIITENISGFLCEGGVNGFLSNKPSTISLAKELNIEPLRGSESSKIRYILIDGKLIRVPENPIKFFLTPLLSFSGKIRMLREYFTPPLKEEIDETVESFVSRRVGKEFYEKLIDAMSTGIYAGDPSKMSMKSCFPKVYWLEKRHGGLLKGLIALKKEKKDTKAQPSGVLMSFKGGMSELIQSLERHLSSRILKGKKVLSIDRKNTYYTVHLDDGNFIEAEKVILACPAHESAEILKELSSELSDILKTIPYPPLSVVAFGFKKEQIGFGTSLYGFLIPYREQRKILGTLFDSSIFPNRAPESYVLLRSMIGGRRAPELAMLPDEKLIDTALSELKPLLNIKGDPEFIKIFRWEKAIPQYELGHEDKLNRIEQILSEFSGLYLTGNAYRGVSVNDCIENSLKLAEGIMV

SEQ ID NO: 303 - protein, 469 aa, Geobacter sp.
MKKAIVAGGGISGLATAYLLKTRAAEEGLELDVTLVEREERLGGKIWSIKEEGYLCEWGPNGFLDSKPQTLDLCRELGASDLLLRSNDNARKRFIYTGGALNRLPENGPMFLKSGLISWPGKLRLAMEPFIPKKAGDEDETLAAFGRRRLGDEALRKLIAPMVSGIFAGNPETMSLRSCFPRIAELEDEYGSLVRAMIRLAKKKKQEVAQGKAVASAAGPGGVLTSFRDGIQALTDILAERLGPDTIVSGQEVLEVSRGGSLPWRVRTGSIDMDADLVILATPAYATASIIQGVDSDMAGILRQIPYATMTVVCFGYDRERIAHDLNGFGYLIPKEEGMNTLGTLWDSSIFENRAPEGQVLLRSMMGGACFPEYVNLTDEEVTGRVKNDLATIMGITAPPSFVRIFRHHQAIPQYTVGHSTRVAALEQRAASLPGLFLTGNSYRGIGLNDCVAAANRTAGEAIAQLTSR

SEQ ID NO: 304 - protein, 469 aa, Geobacter sp.
MKKAIVAGGGISGLATAYLLKTRAAEEGLELDVTLVEREERLGGKIWSIKEEGYLCEWGPNGFLDSKPQTLDLCRELGASDLLLRSNDNARKRFIYTGGALNRLPENGPMFLKSGLISWPGKLRLAMEPFIPKKAGDEDETLAAFGRRRLGDEALRKLIAPMVSGIFAGNPETMSLRSCFPRIAELEDEYGSLVRAMIRLAKKKKQEVAQGKAVASAAGPGGVLTSFRDGIQALTDILAERLGPDTIVSGQEVLEVSRGGSLPWRVRTGSIDMDADLVILATPAYATASIIQGVDSDMAGILRQIPYATMTVVCFGYDRERIAHDLNGFGYLIPKEEGMNTLGTLWDSSIFENRAPEGQVLLRSMMGGACFPEYVNLTDEEVTGRVKNDLATIMGITAPPSFVRIFRHHQAIPQYTVGHSTRVAALEQRAASLPGLFLTGNSYRGIGLNDCVAAANRTAGEAIAQVTSR

SEQ ID NO: 305 - protein, 436 aa, Aquifex sp.
MDMREVVVIGAGISGLSTAYRLKKEGVDVVVYEKDDRIGGTIHTVKEKGYLFEVGAQTILADQEVIDFLKEAGIEPVEASPSSKYRYIYKKGRLIPLPMSPVEFLKTPLLSLKTKLKVLTEIFKRGVDEDISIADFVREHFGEEFLNYVVAPFISGVYAGDPEKLSLKHATPKLYEAQKKYGSLIKAFIKEKTAGPKGKLISFGEGLGELINALAQKLEVHTENVVLRMRKFEDFFRLDVRGKKVETKSVVVASPAYTSSYLLKEVSFSASEEFDKIDYPPVVVVNVGVEGKFPKVRLLSSESGKKRILGAMFMSKLFPGRAPQGKELLTVFLGGATDREVIELSEEEIENIVERELKEILQIDCIDFMHVQKWKRAIPQYTLGYDRFLNLAQEMEKDYPGLFLTGNWLYGVSTADCIRASKKVAQKVLSFLRPQA

SEQ ID NO: 306 - protein, 470 aa, Pelobacter sp.
MNISVVGAGISGLATAFAIQQQARRLGLEWTLDIFEKEDCSGGKIRSEKVDGYLCEWGPNGFLDSKPMTLDLCREAGLAEQLLRSNDAARKRFIFSGGRLQRVPESAADFFRSSLVSWPGKLRLAAELLVPRRKDLTDETLADFVRRRLGREALDQMVGPMAAGIFAGDPETMSLRSCFPRIHELEQQYGGLIRALLLLARKKRAERRAGKAVAGAAGPGGILTSFGGGIQELTDGLSRLLAPNLHLGDAVAAITPLKEGFSLRTHKGRVHETDIVVAAVPAMALATQVEGFSAPMAAQLRQIPYAPLQIACFGYRREALPLSLDGFGYLAARRSGMHSLGTLWSSSIFPGRAPAGYVLLRTMFGGATRPDAAQLSADEVQQRVEEDLSRSMGIKQAPDFVRIIRHTAAIPQYVSGHGARLKVLEDKAAAYPGLFLVGNAFYGVGLNDCVAAADRVASRVLTLMQQRQQA

SEQ ID NO: 307 - protein, 469 aa, Geobacter sp.; identical to SEQ ID NO: 90

SEQ ID NO: 308 - protein, 435 aa, Cytophaga sp.
MIAIIGAGISGLTLAYQLQQAGKPYILFESNSRPGGYINSQRFGKYLLEVGPNSILVDKKLEEFIHELNLDKLFEPAAIINKNRFIYKDANIQQVPSGPLSFLTGRFFSAKTKYAIFKELFNKSISKENETVYDFFARRFSAPFTQYTIDPFATGVYAGDIKQLLIEETFPQLVELEKQYGSIIKGIFKKGFGEKRKTGTFVHGLQTLTDTLAAQLHSLQLNTRVLNLRKQMDKIVLTTDTKHGIEELTFDKVVVCGTTFQAATLIKDSYPDLSAILSQVQYASMKAVFAAFKRTDVTHPMNGFGCLYPSAEQSFLAGTIWNSSIFNDRCPADEVLTTSFIGGMHHPEYTALSESELEQRAIQQLSKDLGITGKPTFTHVAGWNKAIPQYDIYLKKARLASKLLSDDHIYFRSNWTNGISLGNCIQSARDLALIL

SEQ ID NO: 309 - protein, 471 aa, Geobacter sp.
MKKAIIVGGGITGLATAWLLREKAKKAGMELEIALLEKEERVGGKIRSIKADGYLCEWGPNGFLDNKPQTLDLCRDLQADSQLLRSNDNARKRFIYSEGFLHQLPENGPSFFKSKLISWPGKLRLALEPTPFIAKAPDGVDETLAAFGRRRLGDEALRKLIAPMVSGIFAGDPETMSLQSCFPRIAELEREYGGLVMAMVKLAKKKKQELAEGKAVASAAGPGGILTSFRDGLQTLTEIIRGQLGCEVLSVGEEVVRIRKGSSVPYRVETTSRELDADVVVLATPAYATGQMLEGLDSAMTGILGQIPYATMSVVCLGYEQDKISHDLNGFGYLIPKGEGMNILGTLWDSSIFENRAPQGRVLLRSMMGGACFPEYIKLSDEEVQRRVCDNLKTIMGIAAPPDFVRIFRHEKAIPQYTVGHGKRLQALLDAGRNHQGLLLTGNSYRGIGLNDCVAAAVRSSNEVMEHLQKR

SEQ ID NO: 310 - protein, 465 aa, Porphyromonas sp.
MDHLTVIIGAGLTGLTTAAFLRAAGRPVLVLERAAHIGGQIRTYREDGFVFETGPNTGTISSPEVAELFELLGLEPEIATPAASNRLIWKGNKLYPLPRNIAEAVATPLFSLWDKWRILGEPFRRRGGQPNETVGALARRRLGKSFVDYAVDPFLGGIYAGDPDQLVTRFALPKLYDLEQRYGSFVLGAVRKARQPQSERDRKASRKVFSVQGGLGLLVEALADYIGREHILTETQIRYINHPGAHTFGLTYTDASEEEHTIPCRHLVSTVAAHHIPTLFDHFPADESAVFEQLYYAPMIEVAVGFRRNVATHLPAFGCLIPSRENRRILGILFPSDCFRGRAPEGGALYSIFMGGVRNASLIDLSDEEISTIAMEELRDMLRIPHTCKPDLLHISRHRHAIPQYYADTELRQDIIRRMEMRWPGLHLGGNMHGGIGMAHRISQGVEMARSIIEETAIAERSARG

SEQ ID NO: 311 - protein, 464 aa, Corallococcus sp.
MTVAVIGGGITGLALAYQLRARGTDAVVLESTSRVGGNVQTHARGGYLLEAGPNSFLDREPTTRELADALGVSSRIRPADVAAKNRYVFTRGALRALPTSPPAFLKSDILPLASRLRVVGELFSGRNPTGADESLAQLGRRHLGREATAVLLDAMQTGTYAGDPEQLSAEATFPQLVKFEREHRSLILGAIRAQRAARQAKGAVETGPRLTGQMSTFDGGLGVLVDALAKALGDSVRTDAKVEGLERAADGWTVRYQQRGQPAELSASHVVLAVPAHVAASLVRPLDAELAQKADAIPYAPIAVVHLGFAPGTVPKPDGFGFLVPAVEGTAMLGTIHVSTTFPFRVEGGRVLLTCLMGGARRPEVVSRDEDALVALAREELKAMAGLTATPELTAVFRWPRGIPQYTVGHLERLAAMEERLKRWPGLHLAGNAYRGVGVNDCLKEAARLAEALGGPAAGATRSA

SEQ ID NO: 312 - protein, 454 aa, Calditerrivibrio sp.
MRVAIIGGGISGISTAFLLENLKNELNLDMEITIIEKRLRWGGSIETSREDGFIVEAGPNGFLDSKPHTLELLSMAGLSNNLVKSNDLARKRYIMRNGILHRLPENPPMFFKTKLLSFSAKMRILSEYFIQKSVLEDESVADFARRRLGKEALEYLISPMVSGIFAGDPEKMSLRSCFPVIRDLEINYGGLFKGMIKKKGKKSGPSGPGGILTSYKNGLDNMITDLLESTSITKMLNTEVFSIDKKINRYILNTNKGIMEFDKIFINAPAYAVSQMLSVLDKDLSRDLNNITYPPVFVAGFIFKPEDLEDPLDGFGYLIPHSENKRILGALFDSSIFPDRTRDGYKIVRTIMGGDKNRWIIEKSDDELIRMAFDDIKETLKIKREPYKIKYFRWEKAIPQYYIGHHKIVEKVEEFYKKFDDIFIGGNILYGVGINDCTRTSFMNVDRFKNLLNK

SEQ ID NO: 313 - protein, 465 aa, Porphyromonas sp.
MDHLTVIIGAGLTGLTTAAFLRAAGRPVLVLERAAHIGGQIRTYREDGFVFETGPNTGTISSPEVAELFELLGLEPEIATPAASNRLIWKGNKLYPLPRNIAEAVGTPLFSLWDKWRILGEPFRRRGGQPNETVGALARRRLGKSFVDYAVDPFLGGIYAGDPDQLVTRFALPKLYDLEQRYGSFVLGAVRKARQPQSERDRKASRKVFSVQGGLGLLVEALADYIGREHILTETQIRYINHPGAHTFGLTYTDASEEEHTIPCRHLVSTVAAHHIPTLFDHFPADESAVFEQLYYAPMIEVAVGFRRNVATHLPAFGCLIPSRENRRILGILFPSDCFRGRAPEGGALYSIFMGGVRNASLIDLSDEEISTIAMEELRDMLHIPHTCKPDLLHISRHRHAIPQYYADTELRQDIIRRMEMRWPGLHLGGNMHGGIGMAHRISQGVEMARSIIEETAIAERSARG

SEQ ID NO: 314 - protein, 454 aa, Stigmatella sp.
MAVIAVVGGGITGLALAHRLRSRGKDAVVLEAGAHLGGVIQTRQRDGFSTETGPNSFLDREPATRELAASLGIEERIRMADPSAKSRSLYTRGQLRPVPASPPAFLKSDLLPLGTRLRVLAELFTGRAPPGQDESLGDFGRRHVGARATSVLLDAMQTGTYAGDVEALSAEAAFPTLKQLEREHRSLLLGAVRTQGRQRAPAPAGTKLKGAMCTFEGGLGTLVEALARALGPAARTGAAVEGLARSQNGWRLSVRERGQQAELEASQVVLTSPAHVSAELLAPLDPSLAGHLKGIPYAPIAVVHLGFAPGKTPPPDGFGFLVPGQEQRQLLGVIHVSTVFPFRAEGGRVLYTCLMGGARRPDLVGLNEEALAALAQQELREMAGVTASPDFTEAVRWPRGIPQYTVGHLERLSAIDSALARLPGLHLAGNAYKGVGLNDCIRNAAALAETLASR

SEQ ID NO: 315 - protein, 465 aa, Porphyromonas sp.
MDHLTVIIGAGLTGLTTAAFLRAAGRPVLVLERAAHIGGQIRTYRENGFVFETGPNTGTISSPEVAELFELLGLEPEIATPAASNRLIWKGNKLYPLPRNIAEAVATPLFSLWDKWRILGEPFRRRGGQPNETVGALARRRLGKSFVDYAVDPFLGGIYAGDADQLVTRFALPKLYDLEQRYGSFVLGAVRKARQPQNERDRKASRKVFSVQGGLGLLVEALADYIGREHILTETQIRYINHPGAHTFGLTYTDASEEEHTIPCRHLVSTVAAHHIPTLFDRFPADESAVFEQLYYAPMIEVAVGFRRNVATHLPAFGCLIPSRENRRILGILFPSDCFRGRAPEGGALYSIFMGGVRNASLIDLSDEEISTIAMEELRDMLHIPHTCKPDLLHISRHRHAIPQYYADTELRQDIIRRMEMRWPGLHLGGNMHGGIGMAHRISQGVEMARSIIEETAIAERSARG

SEQ ID NO: 316 - protein, 462 aa, Leptospirillum sp.
MSTVFRCDVLIVGGGISGLAAAMVLHQAGKNILLVESRGYLGGAIRSVEDSGYLLEMGPNSMMLGPEDPINVWLDKLGLSEKLLKASPEAQNRYVWCQGKLIPVPLSPSSFLTTPLFSLSEKMRVAKEFFISPGSGLPEGSDETVGHFVRRRLGNEFLEKLIDPFVKGVYASHPDLLSLNSAFPLLARLEQESGGLIRGAIRLSREKKRKKANLTGPPGGLYSFSGGLGEMVRAFSGYLKDESLIHGELIHWNRLPSGEFQCVLLQDEERVEVISQKMILATSPADAGRILEKNQPEIASVLSSIPMAPIAIAYIGVDRKALPGYLPGFGVLFPTSEKRKILGIIQNSDLFPNRSPDGKVLLTIFAGGMLSPKIAMSFDEDFEQIVLGELKTVFGLDSRPEFFRIQRWAEGISQYSPGHASRIQRIRDLTPEGMILTGNYLGGISVLKTFTNGLEAGKAFLS

SEQ ID NO: 317 - protein, 454 aa, Spirosoma sp.
MTIGIIGAGISGLTLAYELQRRGIAYHLWEAAGQAGGYIRSQRDWPDGPSGRNYLRELGPNSLLGDAELLNWLDELGLTPELTFSQPVSKARFIFRDGKYRQLPSGPPSLLFGNFFSWKTKLAILRERNNKTVSPPGETLGQFFRRRFSSEIVDYALGPFVAGIYAGDPEQLLVSETFPSLLQYEKEYGSVLRGLIKSQSAGGSAIGRRQSFSFREGMQMLPNALAAKLTNLSLNEAVSSISPTPNGWEVETNTGTTTVDKLVLAVGTDAAARLVDQRYPDLARTLQAITYPPMTAVHSAYKRADVRHPLNGFGGLNPAVEGRFAAGHIWSSSIFTGRCPDDEVLFTTFVGGQTGAHNTRHPDSVLAHNVHKELVDGFGITAATPVYQSVFRWERAIPQYDATLASAKESVKAMEADQLFVCANWYGGVSLSDCIGKSRKLADQLAVKPFIKNF

SEQ ID NO: 318 - protein, 495 aa, Candidatus sp.
MATEQHSGSRRIVVVGSGIAGLAAAYRLQERCEQDGPPCEVRVLEAAARPGGAISTTHRDGFVLESGPDTIFTDKPWGLDLIRRLGLSEQVIGTNEAHRRTFVVRDGALHPLPEGFALMGPTKPWPFLQSGLLSWRGKARAALDLVLPRGGPSDDESLASFVRRRFGQEFLDRLAQPMIGGIYGADPERLSLRATFPQFLQMEATHRSVILGLRRMRPAGRGVGHTSSGPRYGLFVTLDHGLQALVDAMVKRLPAGTLRLRAPVDRIAHTEQGWTVRLGDGASLQADGLILAVPAFEIARLTHDLDQDLARQLEAMPYASSVTINLAYRREAIHHPLDGFGFVVPACEGRTIIACSFSSVKFAHRAPAGHVLLRAFAGGALQPEPFTWDDETLLSAVRRDLEELLAIHAPPLWSQLVRHPRVMPQYQVGHLGRLAALEETLRRWPTLKLTGNAYRGVGVPDVVHSGETAADSLLAELAPSPTEPTPACTEGDSRL

SEQ ID NO: 319 - protein, 469 aa, Pelobacter sp.
MKRAIIVGGGISGLATAWLLREKALACGIQLELVLLEKDQRPGGKIRSIHEGGYVCEWGPNGFLDSKPQTLELCDAVGVSSDLLRSNDNARKRFIYSDGELHRLPEGGGTFLKSRLISWPGKLRLALEPTPFIARTPAGVDESLADFARRRLGGEALDKLISPMVSGIFAGDPETMSLVSCFPRIAQLEREYGGLIRAMVRLARQKKRERAAGKAVSSAAGPGGVLTSFRPGIQYLTDSLAASLGGIVMADREVSWVRRGKSAAWRVGCRDGGEYDADLVIVASPAHAASAILHDCDAGIASILESIPYASMTVVCLGYERELVSHPLDGFGYLIPKKEGRSILGTLWDSSMFENRAPTGKVLLRSMVGGACFPDYVHMGDDELLGRVRGDMKDVMGIVAEPSFIRIFRHPQAIPQYTVGHGERLKHLEERLACHPGLILTGNSYRGIGLNDCVAAAQRASDQALELLR

SEQ ID NO: 320 - protein, 436 aa, Aquifex sp.; identical to SEQ ID NO: 305

SEQ ID NO: 321 - protein, 495 aa, Candidatus sp.; identical to SEQ ID NO: 318

SEQ ID NO: 322 - protein, 457 aa, unidentified; identical to SEQ ID NO: 67
  REGION 1..457: note = Unknown

SEQ ID NO: 323 - protein, 462 aa, unidentified; identical to SEQ ID NO: 74
  REGION 1..462: note = Unknown

SEQ ID NO: 324 - protein, 467 aa, unidentified; identical to SEQ ID NO: 26
  REGION 1..467: note = Unknown

SEQ ID NO: 325 - protein, 535 aa, Amaranthus sp.; identical to SEQ ID NO: 5

SEQ ID NO: 326 - protein, 493 aa, Silene sp.
TSDPDKLQSSAKRVAVIGAGVSGLAAAYKLKSNGLNVTLIEADERAGGKIRSAAKNGYIWDEGANTMTESESEVTSLLDDLGIRDKQQLPLSQNKRYVVRDGLPVLLPSGPISIFTSNFLSPKSKLRLLCEPFSWRRRDNAKVSDEQADESVSDFFGRHFGEEFVDYLIDPFVGGTSAADPKTISMRHSFPELWDIEDRFGSIIAGAIQSRLTPKPGEQKKPVKKTRVRGSFSFKGGMQTLVDTICERFSEDELKLKCKVLSLSYSHEGHSNNWSLSCLSNKSIEDRPYDAVVVTAPLTNVKDMKILNGGSPFSLDFVPEVDYLPVSIIVTAFKKANVERPLEGFGVLIPSKEQEKGLKTLGTLFSSMMFPDRSPADQYLYTTFVGGSRNRELARATTDELKQVVLSDLQQLLGVKGDPSFINHVYWSKAFPRYGQNYESVKMAIAKMENDLPGFFYAGNHKDGLSVGKALASGYKAADLVMSYLNSYSNTNQ

SEQ ID NO: 327 - protein, 493 aa, Silene sp.
TSDPDKLQSSAKRVAVIGAGVSGLAAAYKLKSNGLNVTLIEADERAGGKIRSAAKNGYIWDEGANTMTESESEVTSLLDDLGIRDKQQLPLSQNKRYVVRDGLPVLLPSGPISIFTSNFLSAKSKLRLLCEPFSWRRRDNAKVSDEQADESVSDFFGRHFGEEFVDYLIDPFVGGTSAADPKTISMRHSFPELWDIEDRFGSIIAGAIQSRLTPKPGEQKKPVKKTRVCGSFSFKGGMQTLVDTICERFSEDELKLKCKVLSLSYSHEGHSNNWSLSCLSNKSIEDRPYDAVVVTAPLTNVKDMKILNGGSPFSLDFVPEVDYLPVSIIVTAFKKANVERPLEGFGVLIPSKEQEKGLKTLGTLFSSMMFPDRSPADQYLYTTFIGGSRNRELARATTDELKQVVLSDLQQLLGVKGDPSFINHVYWSKAFPRYGQNYESVKMAIAKMENDLPGFFYAGNHKDGLSVGKALASGYKAADLVMSYLNSYSNTNQ

SEQ ID NO: 328 - protein, 501 aa, Solanum sp.; identical to SEQ ID NO: 21

SEQ ID NO: 329 - protein, 463 aa, unidentified; identical to SEQ ID NO: 87
  REGION 1..463: note = Unknown

SEQ ID NO: 330 - protein, 544 aa, Zea sp.; identical to SEQ ID NO: 30

SEQ ID NO: 331 - protein, 507 aa, Oryza sp.
MAASDDPRGGRSVAVVGAGVSGLAAAYRLRKRGVQVTVFEAADRAGGKIRTNSEGGFIWDEGANTMTESELEASRLIDDLGLQGKQQYPNSQHKRYIVKDGAPTLIPSDPIALMKSTVLSTKSKLKLFLEPFLYEKSSRRTSGKVSDEHLSESVASFFERHFGKEVVDYLIDPFVAGTSGGDPESLSIRHAFPALWNLENKYGSVIAGAILSKLSTKGDSVKTGGASPGKGRNKRVSFSFHGGMQSLIDALHNEVGDGNVKLGTEVLSLACCCDGVSSSGGWSISVDSKDAKGKDLRKNQSFDAVIMTAPLSNVQRMKFTKGGVPFVLDFLPKVDYLPLSLMVTAFKKEDVKKPLEGFGVLIPYKEQQKHGLKTLGTLFSSMMFPDRAPNDQYLYTSFIGGSHNRDLAGAPTAVLKQLVTSDLRKLLGVEGQPTFVKHVHWRNAFPLYGQNYDLVLEAIAKMENNLPGFFYAGNNKDGLAVGNVIASGSKAADLVISYLESCTDQDN

SEQ ID NO: 332 - protein, 542 aa, Setaria sp.; identical to SEQ ID NO: 27
  source 1..542: note = Setaria (grass)

SEQ ID NO: 333 - protein, 507 aa, Brachypodium sp.
MAASDDPRAAPARSVAVVGAGVSGLVAAHRLRKSGVRVTVFEADDRAGGKIRTNSDSGFLWDEGANTMTESALEASRLIDDLGLQDKQQYPNSQHKRYTVKDGAPTLIPSDPIALMKSTVLSTKSKFKLFLEPFLYEKSHTRNSQKVSDNHLSESVGSFFERHFGKEVVDYLIDPFVAGTSAGDPESLSIRHAFPGLWDLEKKYGSIIVGAILSKLTAKGDSTKKADTSSGKGRNKQASFSFHGGMQTLVEGLHKDVGDGNVKLGTQVLSLACSCDRLSASDGWSISVNSKDASSKLAAKNQLFDAVIMTAPLSNVQRMKFTKGGVPFVLDFLPKVDYLPLSLMVTAFRKEDVKRPLEGFGVLIPYKEQQKYGLKTLGTLFSSMMFPDRAPNDQHLFTTFVGGSHNRDLAAAPTAILKQLVTSDLRKLLGVEGQPTFVKHVHWKNAFPLYGHDYDLALEAIGKMENELPGFFYAGNNKDGLAVGNVIASGSKTADLVISYLESHQAR

SEQ ID NO: 334 - protein, 551 aa, Oryza sp.
MLSPAATTTTTTSYCSYSSRAHAPTRSASAGAARFRPARAMATSDNDPRGAAPARSVAVVGAGVSGLAAAYKLRKRGVQVTVFEAADRAGGKIRTNSESGFIWDEGANTMTESESEAGRLIDDLDLQGKLQYPNSQHKRYIVKDGAPTLIPSDPIGLMKSTVLSTKSKLKLFLEPFLYEKSSKRNSGKVSDEHLSESVASFFERHFGKEVVDYLIDPFVAGTSGGDPESLSIRHAFPALWNLENKYGSVIAGAILSKLSTKGESVKTGGATPGKGRNKRVSFSFHGGMQSLIDALHNEVGDGNVKLGTEVLSLACSCDEISSSGGWSIAVDSRDAKGKDLRKNQSFDAVIMTAPLSNVQRMKFTKNGAPFVLDFLPKVDYLPLSLMVTAFKKEDVKRPLEGFGVLIPYKEQQKHGLKTLGTLFSSMMFPNRAPNDQYLYTSFIGGSHNRDLAGASTAILKQLVTSDLRKLLGIEGQPTFVKHVHWGNAFPLYGRNYDLVLEAIAKMEKNLPGFFYAGNNKDGLAVGNVIASGSKAAELVLSYLESHTDQDN

SEQ ID NO: 335 - protein, 494 aa, Picris sp.; identical to SEQ ID NO: 38

SEQ ID NO: 336 - protein, 506 aa, Oryza sp.; identical to SEQ ID NO: 37

SEQ ID NO: 337 - protein, 465 aa, unidentified
  REGION 1..465: note = Unknown
MDHLTVIIGAGLTGLTTAAFLRAAGRPVLVLERAAHIGGQIRTYREDGFVFETGPNTGTISSPEVAELFELLGLEPEIATPAASNRLIWKGNKLYPLPRNIAEAVGTPLFSLWDKWRILGEPFRRRGGQPNETVGALARRRLGKSFVDYAVDPFLGGIYAGDPDQLVTRFALPKLYDLEQRYGSFVLGAVRKARQPQSERDRKASRKVFSVQGGLGLLVEALADYIGREHILTETQIRYINHPGAHTFGLTYTDASEEEHTIPCRHLVSTVAAHHIPTLFDRFPANESAVFEQLYYAPMIEVAVGFRRNVATHLPAFGCLIPSRENRRILGILFPSDCFRGRAPEGGALYSIFMGGVRNASLIDLSDEEISTIAMEELRDMLHIPHTCKPDLLHISRHRHAIPQYYADTELRQDIIRRMEMRWPGLHLGGNMHGGIGMAHRISQGVEMARSIIEETAIAERSARG

SEQ ID NO: 338 - protein, 505 aa, Oryza sp.
MAASDDPRGGRSVAVVGAGVSGLAAAYRLRKRGVQVTVFEAADRAGGKIRTNSEGGFIWDEGANTMTESELEASRLIDDLGLQGKQQYPNSQHKRYIVKDGAPTLIPSDPIALMKSTVLSTKSKLKLFLEPFLYEKSSRRTSGKVSDEHLSESMFSDQREYICSVIFLCICRDNQVVDYLIDPFVAGTSGGDPESLSIRHAFPALWNLENKYGSVIAGAILSKLSTKGDSVKTGGASPGKGRDKRVSFSFHGGMQSLIDALHNEVGDGNVKLGTEVLSLACCCDGVSSSGGWSISVDSKDAKGKDLRKNQSFDAVIMTAPLSNVQRMKFTKGGVPFVLDFLPKVDYLPLSLMVTAFKKEDVKKPLEGFGALIPYKEQQKHGLKTLGTLFSSMMFPDRAPNDQYLYTSFIGGSHNRDLAGAPTAILKQLVTSDLRKLLGVEGQPTFVKHVHWRNAFPLYGQNYDLVLEAIAKMENNLPGFFYAGKSMKAPLLYKRNLRYLKHIPVD

SEQ ID NO: 339 - protein, 461 aa, Salinibacter sp.; identical to SEQ ID NO: 53

SEQ ID NO: 340 - protein, 469 aa, Rhodothermus sp.; identical to SEQ ID NO: 51

SEQ ID NO: 341 - protein, 483 aa, Tribolium sp.
  source 1..483: note = Tribolium (grass)
NMSLRLVLFLVFCIGKVLGNFSVIVIGAGPSGIAAATKLLQHSVNVTVLEAENRIGGRINTVKFGDGLVELGAEYCHGEVGNIVKELVNGYDLLEPNFNYLNGEIYYSNGSKLDHGFVREMQDLILSENKEENYDTRGKSIGEVFMHKYNSTLVEKYKSDENKLKLLKEGLHFAERSILISEGSFSWFDASADSDWLECPGNQTLVWKGVGYKTVLEILMKSYPNPDEKLPLDDKLFLNSKVTKINWGEKPIKVHTSDKVYSADYVIFTPSIGVLKAGSDLFTPSLPPKKHKAIDSIGFAGVVKLFLRFPVKWWDDNDKYFAFFWSDDDLKSENFPEGPPEKRKIVGYPAVGLVPSWAQHQRLDDLDLGEMVPEIEQLPIETLKKGVNFTLEKFLGKDYNITEIGEVLRSGWVTNENFRGTYSFTRNGLYQKGVSYQNDLAEPLEGLFFAGEATNPVHFATVHGAIESGHREARRILDPRNKN

SEQ ID NO: 342 - protein, 453 aa, Tribolium sp.
  source 1..453: note = Tribolium (grass)
SVIIVGAGVSGISAAVKLFENGIANLKIFEAEDRIGGRIHTVKFGDNFIDLGAQYCHGENVVYDTVKDLDLLEHAQLFSTPKMYYSNGSHLDNQLTQDLQKVVSSYDHDITRSKELSLGDAFLKKYNSTILEKYKNDPENFKLASDGLTFAHSTILMHEGAFHWSRPASGRHYKAVKGDQMMVWKQRGYDMILDVLLKRYPDPSLKIPIEEKLFLNKRVTKITWTGDKASVKLSDGTSHEADHVIFTPSVGVLTHDDLFEPVVPPRKQQAIKSMGFDGIIKLILYFPEKWWHDSDSTFFFLWDRKDLEGITKEFNEGPSKDGISWVSNLVALVKVPSNPHVLIGWVSGGLIPEMEKMSLDVVKKGSMFVIRKFLGRDYNVTEPGEVLWSDWHNNPNFRGTYSYEKNGYFEEEVHYQDHLAEPLTQGTTPVVLFAGEATHPTHYSTVHGAIESG

SEQ ID NO: 343 - protein, 612 aa, Mycosphaerella sp.
MASSSSPNHGKKAIVIGAGVGGVSTAARLAAAGFSVTVLEKNSFTGGRCSLIHHDGYRFDQGPSLLLLPHLFHATFADLGTTLEKEGVHLLKCEPNYNIHFGDGEKFTLSTDLSVMKEEIEKWEGKDGYDRYLAFLRESHAHYELSVTHVLLKNFTSLLSMLRISFLQHLVALHPFESIWSRASRYFWTERLRRVFTFGSMYMGMSPFDAPGTYSLLQYTELAEGIWYPVGGFHKVVGALVGIAERMGAEFRLETAVKRICVTADGARATGVELENGEVLEADVVVNNSDLVYAYNHLLQPQAYAESLSDRPGSCSSISFYWALDRKVPELSAHNIFLADDYRESFDSIFKKHLIPDQPSFYVNVPSRVDSTAAPEGKDTVVVLVPVGHLTGEAAASHFSQPASSPSKPNGGTIKSASPSTQTGIPPTLDQDWPAMIALARQTIIKTIHHRTGVDLHPLIIHEQSNDPVTWRSAFNLDKGAILGLSHSFFNVLCFRPSTRARRAGPLDPLLKYLSGLYMVGASAHPGTGVPIVLAGGKLVAEQVCGDMGVRVPWVVEEGRGKGKEEVKKLDRMEKPETWVKWVGILIALGMVPWILGWVVVLFLAKVASVGW

SEQ ID NO: 344 - protein, 936 aa, Mycosphaerella sp.
MSIDTEEATCQVPVELSAGSESEEELNDIAEHELEDDFDPHFHREGQATPMVDIAGPASESQHQQPPAFSRWVSKLRRKRHNHPQLLSPRKERWTLDDFDTRAASPGQQYLSPGRHYHSDSQGSSVRFVTAVRSATATLASASMATLSRRTTRFRRGHQRSSIVSGSEIRLSIESRRSIIDEAAKQRARKRREKLEELIRTEESYVADVKALSNAYFTILAHQPTATSFARTSTQRTIADILHLHDDILGCLHRIVPFAEYDQTIARLPLPLRAHNRWHSMDAVPQRTTPNRSTLATIRQGRRSLNISRSSSDDAQVVLRCSPQTIAAVAKAFSDNMLRFAAYEDYGANYDLIQRDVDDTQRAISGWADFDKAIEAISAHVNPMRTREANRKRAMTVKDLLIKPIQRLPRYELLFSDLHKLTPACDDPISHAEIEELRLKLNSVCHRMNAAKENPARARALEMTWLIGDRLTFSSQVPRSIFLQLLGRVSLCGSLYIAYRSRDRIKGAYVICVLFESCLLLASCDEDQSKYSILVSITLANATIEETDNAKGLQCHTAPHAWKVVFEQGARMYELIFTACSAVESEVWRTHIASGIETQIAAVAEGKANVFELQSPLTADMKSIGKAFGKPGSFVRRMSVQRAATIGPTADLNQVIIKNTQAVKEVMDNSSQGSFQIPRSQSVATPSHVQTLAPRRADRHRLETILSDVWSRDLLPYPGMVRRSDPIRAGANHVIRKFSMASITSNFSSSKRTGSYTSMSSWRKEDMPPPRNRGESGREGSSMSSRQSRPPLIDFHTAPDAFLPADFEIGRPSKDKRKRSALRTFTMTMERPFTPLLGNENKQSGLRRAQSVKDVVDDQARPGPSPIQLKRREEKRTGTPVYSVVQERARTPAMLHVKDESLEMGMGVGEASNGAVAGKAPRKSKSRLLRLFGQER

SEQ ID NO: 345 - protein, 573 aa, Mycosphaerella sp.
MLHSRSCTYRLLAPAVARRITPLVPSQCLLQTHRSRTYSAEAAPSHDVAVLGGGITGLAAAHYVTREHPRAKVTLYEASDRVGGWVSSKRADVHDGTVLFEGGPRTLRPNGNGVLAANASQMQELDLTKDAIFTQKSSPAAQNRFVYYPDHIVRMPHPSAGLFNNLWSLMTEPVFATALKSGFMEAFTTGRDGSIQDESIAEFFSRRLSPTMVDRILSAVIHGIYAGDVNKLSAKSLFPNQWRHEAKYDSLIKGVIQERAEGTMVTKREADFLQAMKVFEWDPLLKATLKDNSVFTFKDGLQMLPDRLHSRLFEDGRVEFKTGSPVESIVQSQGNSGIQVTTKGSTESKTHTHVISALSPEHLNTVCRHGSASSRLIDSIPTVTVMTVSMYFRTPDLHEPGFGYLIPQATPFENNPERALGVVFDTAYSPGSSDSRGTKVTVMLGGHWWDGWPAFPDEEEGVTMARAVLERHLGIKEAPEAWQVNLQADCIPQYTVGHETRLKKAHNNIWQEYKGRLRVAGNWMSGVGVNDCLRSAYEVARNLSKDGTGLQHVGEAPTLRMKPVRPGEKTEES

SEQ ID NO: 346 - protein, 239 aa, Apisum sp.
KREGGIEKNQSIQIIEASDHTGGWIQSWKDENTNVISELGPRTIRGRGKSANNTYSLIKDLGIEDLVRNVGIDASARYIFANGNIHQLPMSVWKALFTVNQPFTKPWIYYVLRECFSSNNSKDKLSDVQNNDESAYDFFCRTFGQEFADYLISPLLCGVCGGNAKQMSVKFMFGALYEAERKHGTVGLGLLKEQLSSIWNREKVKDTKGTNTVKPPPSVYYLDGGLQRLIHALDIENES

SEQ ID NO: 347 - protein, 502 aa, Schizophyllum sp.
MAPHHIAVLGGGLTGLSSAYHLSHRFPNALITLVERSTRVGGWAESERVSLKDPKDGSEASILIEGGPRTLRPTAKSVLELVTRLDLLDDLILVPRTSPSAKNKYFHMPGQPGLLAVPSSFKGLISSPLGACLTRAVAKEAMAFSNRDDLKDESFDSFLCRRFTAEFAEKVGSALVHGIFAADSRKLSVRAAFPVLWEAEEYGWGSVVRGFIRGRREEDVEESYYISNPVQKAMEETAVFSFRNGMDTVARATEHHLSKLKNVTILKGADVKSLGVNSKDKSIEVQIRPTHVVSTLPLPALHRVLTPTSNLPHLTTNPYSTVTVYNLIFRTDTPTPIHPAGFGYLIPRPPGGYEQPQANKEGILGCVFDSCALSAQDVMPGPTKYTKMTVMTGGPYQNKPPALDTVLQALARHLDWPEVYEPVYTRVRENRDCIPVPAPGHLERVAELRRVLKEGEWQGRMEVVGAGVGGVSVGDCVEAGRWVGEGWGPSTPQMEDDECDDE

SEQ ID NO: 348 - protein, 150 aa, Acinetobacter sp.
MDAPSDAFLWVKALHIIAVVCWFAALFYLPRLYVYHAMSEDDTSHRRFEVMERKLYRGIMWPSMIATLITAHFLVDWGDATRHYHEALWFYIKVGLVGLLVIYHFVCGYYRKKLIGNAHYKSHKFWRYFNEMPTLILFAVVILVVVKPQF

SEQ ID NO: 349 - protein, 150 aa, Acinetobacter sp.
MDAPSDAFLWVKALHIIAVVCWFAALFYLPRLYVYHAMSEDEISHRRFEIMERKLYRGIMWPSMIATLITAHFLVDWGDATRHYHEALWFYIKVGLVGLLVIYHFVCGYYRKKLIGNAHYKSHKFWRYFNEMPTLILFAVVILVVVKPQF

SEQ ID NO: 350 - protein, 150 aa, Acinetobacter sp.
MDAPSDAFLWVKALHIIAVVCWFAALFYLPRLYVYHAMSEDEISHRRFEIMERKLYRGIMWPSMIATLITAHFLVDWGDATRHYHQALWFYIKVGLVGLLVIYHFVCGYYRKKLIGNAHYKSHKFWRYFNEMPTLILFAVVILVVVKPQF

SEQ ID NO: 351 - protein, 150 aa, Acinetobacter sp.
MDAPSDAFLWVKALHIIAVVCWFAALFYLPRLYVYHAMSEDTVSHQRFEVMERKLYRGIMWPSMIATLITAHFLVDWGDATRHYHEALWFYLKVGLVGLLVIYHFVCGYYRKKLIGNAHYKSHKFWRFFNEMPTLILFAVVILVVVKPQF

SEQ ID NO: 352 - protein, 150 aa, Acinetobacter sp.
MDAPSDAFLWVKALHIIAVVCWFAALFYLPRLYVYHAMSEDAVSHQRFEVMERKLYRGIMWPSMIATLITAHFLVDWGDATRHYHEALWFYLKVGLVGLLVIYHFVCGYYRKKLIGNAHYKSHKFWRFFNEMPTLILFAVVILVVVKPQF

SEQ ID NO: 353 - protein, 150 aa, Acinetobacter sp.
MDAPSDAFLWVKALHIIAVVCWFAALFYLPRLYVYHAMSEDAVSHQRFEVMERKLYRGIMWPSMIATLITAHFLVDWGDATRHYHEALWFYLKVGMVGLLVIYHFVCGYYRKKLIGNAHYKSHKFWRFFNEMPTLILFAVVILVVVKPQF

SEQ ID NO: 354 - protein, 150 aa, Acinetobacter sp.
MDAPSDAFLWVKALHIIAVVCWFAALFYLPRLYVYHAMSEDVVSHQRFEVMERKLYRGIMWPSMIATLITAHFLVDWGDATRHYHEALWFYLKVGLVGLLVIYHFVCGYYRKKLIGNAHYKSHKFWRFFNEMPTLILFAVVILVVVKPQF

SEQ ID NO: 355 - protein, 150 aa, Acinetobacter sp.
MDAPSDAFLWVKALHIIAVVCWFAALFYLPRLFVYHAMSEDTVSHQRFEVMERKLYRGIMWPSMIATLITAHFLVDWGDATRHYHEALWFYLKVGLVGLLVIYHFVCGYYRKKLIGNAHYKSHKFWRFFNEMPTLILFAVVILVVVKPQF

SEQ ID NO: 356 - protein, 150 aa, Acinetobacter sp.
MDAPSDAFLWVKALHIIAVVCWFAALFYLPRLYVYHAMSEDAVSHQRFEVMERKLYRGIMWPSMIATLITAHFLVDWGDASRHYHEALWFYLKVGLVGLLVIYHFVCGYYRKKLIGNAHYKSHKFWRFFNEMPTLILFAVVILVVVKPQF

SEQ ID NO: 357 - protein, 150 aa, Acinetobacter sp.
MDAPSDAFLWVKALHIIAVVCWFAALFYLPRLFVYHAMSEDAVSHQRFEVMERKLYRGIMWPSMIATLITAHFLVDWGDATRHYHEALWFYLKVGLVGLLVIYHFVCGYYRKKLIGNAHYKSHKFWRFFNEMPTLILFAVVILVVVKPQF

SEQ ID NO: 358 - protein, 150 aa, Acinetobacter sp.
MDAPSDAFLWVKALHIIAVVCWFAALFYLPRLFVYHAMSEDAVSHQRFEVMERKLYRGIMWPSMIATLITAHFLVDWGDATRHYHEALWFYLKVGLVGLLVIYHFICGYYRKKLIGNAHYKSHKFWRFFNEMPTLILFAVVILVVVKPQF

SEQ ID NO: 359 - protein, 150 aa, Acinetobacter sp.
MDAPSDAFLWVKALHIIAVVCWFAALFYLPRLYVYHAMSEDAVSHQRFEVMERKLYRGIMWPSMIATLITAHFLVDWGDATRHYHEALWFYLKVGLVGLLVIYHLVCGYYRKKLIGNAHYKSHKFWRFFNEMPTLILFAVVILVVVKPQF

SEQ ID NO: 360 - protein, 150 aa, Acinetobacter sp.
MDAPSDAFLWVKALHIIAVVCWFAALFYLPRLFVYHAMSEDAVSHQRFEVMERKLYRGIMWPSMIATLITAHFLVDWGDASRHYHEALWFYLKVGLVGLLVIYHFVCGYYRKKLIGNAHYKSHKFWRFFNEMPTLILFAVVILVVVKPQF

SEQ ID NO: 361 - protein, 150 aa, Acinetobacter sp.
MDAPSDAFLWVKALHIIAVVCWFAALFYLPRLYVYHAMSEDAVSHQRFEVMERKLYRGIMWPSMIATLITAHFLVDWGDATRHYHEALWFYLKVGLVGLLVIYHLVCGYYRKKLIGNAHYKTHKFWRFFNEMPTLILFAVVILVVVKPQF

SEQ ID NO: 362 - protein, 150 aa, Acinetobacter sp.
MDAPSDAFLWVKALHIIAVVCWFAALFYLPRLFVYHAMSEDALSHQRFEVMERKLYRGIMWPSMIATLITAHFLVDWGDATRHYHDALWFYLKVGLVGLLVIYHFVCGYYRKKLIGNAHYKSHKFWRFFNEMPTLILFAVVILVVVKPQF

SEQ ID NO: 363 - protein, 150 aa, Acinetobacter sp.
MDAPSDAFLWVKALHIIAVVCWFAALFYLPRLYVYHAMSEDAISHQRFEVMERKLYRGIMWPSMIATLITAHFLVDWGDATRHYHEALWFYLKVGLVGLLVIYHLVCGYYRKKLIGNAHYKTHKFWRFFNEMPTLILFAVVILVVVKPQF

SEQ ID NO: 364 - protein, 150 aa, Acinetobacter sp.
MDAPSDAFLWVKALHIIAVVCWFAALFYLPRLYVYHAMSEDKVSHQRFEVMERKLYRGIMWPSMLATLITAHFLVDWGDATRHYHEALWFYLKVGLVGLLVIYHFVCGYYRKKLISNAHYKSHQFWRFFNEMPTLILFAVVILVVVKPQF

SEQ ID NO: 365 - protein, 150 aa, Acinetobacter sp.
MDAPSDAFLWVKALHIIAVVCWFAALFYLPRLYVYHAMSEDEISHQRFEVMERKLYRGIMWPSMIATLVTAHFLVEWGDATRHYHEAIWFYLKVGLVGLLVIYHFVCGYYRKKLIGNAHYKSHKFWRFFNEMPTLLLFAIIILVVVKPQF

SEQ ID NO: 366 - protein, 150 aa, Acinetobacter sp.
MDAPSDAFLWVKALHIIAVVCWFAALFYLPRLYVYHAMSEDAISHQRFEVMERKLYRGIMWPSMIATLVTAHFLVEWGDATRHYHEALWFYLKVGLVGLLVIYHFVCGYYRKKLIGNAHYKSHKFWRFFNEMPTLLLFAIIILVVVKPQF

SEQ ID NO: 367 - protein, 150 aa, Acinetobacter sp.
MDAPSDAFLWVKALHIIAVVCWFAALFYLPRLYVYHAMSDDAVSHQRFEVMERKLYRGIMWPSMIATLITAHFLVDWGDATRHYHEALWFYLKVGLVGLLVIYHFVCGYYRKKLIGNAHYKSHKFWRFFNEMPTLILFAVVILVVVKPTF

SEQ ID NO: 368 - protein, 150 aa, Acinetobacter sp.
MDAPSDAFLWVKALHIIAVVCWFAALFYLPRLYVYHAMSEDAISHQRFEVMERKLYRGIMWPSMIATLLTAHFLVDWGDATRHYHEALWFYMKVGLVGLLVIYHFVCGYYRKKLIGNAHYKSHRFWRFFNEMPTLLLFAIIILVVVKPQF

SEQ ID NO: 369 - protein, 150 aa, Acinetobacter sp.
MDAPSDAFLWVKALHIIAVVCWFAALFYLPRLYVYHAMSEDAVSHQRFEVMERKLYRGIMWPSMIATLITAHFLVDWGDATRHYHDALWFYLKVGLVGLLVIYHFVCGYYRKKLIGHAHYKSHKFWRFFNEMPTLILFAVVILVVVKPQF

SEQ ID NO: 370 - protein, 150 aa, Acinetobacter sp.
MDAPSEAFLWVKALHIIAVVCWFAALFYLPRLYVYHAMSEDTVSHQRFEIMERKLYRGIMWPSMIATLITAHFLVDWGDATRHYHEALWFYLKVGLVGLLVIYHFVCGYYRKKLIGNAHYKSHKFWRFFNEMPTLILFAVIILVVVKPTF

SEQ ID NO: 371 - protein, 150 aa, Acinetobacter sp.
MDAPSDAFLWVKALHIIAVVCWFAALFYLPRLYVYHAMSEDAISHQRFEVMERKLYRGIMWPSMIATLVTAHFLVEWGDATRHYHEAIWFYLKVGLVGLLVIYHFVCGYYRKKLIGNAHYKSHKFWRFFNEMPTLLLFAIIILVVVKPQF

SEQ ID NO: 372 - protein, 150 aa, Acinetobacter sp.
MDAPSDAFLWVKALHIIAVVCWFAALFYLPRLYVYHAMSDDATSHQRFEVMERKLYRGIMWPSMIATLITAHFLVDWGDATRHYHEATWFYLKVGLVALLVIYHLVCGYYRKKLIGNAHYKSHKFWRFFNEMPTLILFAVVILVVVKPQF

SEQ ID NO: 373 - protein, 150 aa, Acinetobacter sp.
MDAPSDAFLWVKALHIIAVVCWFAALFYLPRLYVYHAMSEDAVSHQRFEVMERKLYRGIMWPSMIATLVTAHFLVDWGDATRHYHDALWFYLKVGLVGLLVIYHLVCGYYRKKLIGNAHYKSHRFWRFFNEMPTLILFAVVILVVVKPQF

SEQ ID NO: 374 - protein, 150 aa, Acinetobacter sp.
MDAPSDAFLWVKALHIIAVVCWFAALFYLPRLYVYHAMSEDAVSHQRFEVMERKLYRGIMWPAMLATLITAHFLVDWGDATRHYHEALWFYLKVGLVGLLVIYHLVCGYYRKKLIGNAHYKSHKFWRYFNEMPTLILFAVVILVVVKPTF

SEQ ID NO: 375 - protein, 150 aa, Acinetobacter sp.
MDAPSDAFLWVKALHIIAVVCWFAALFYLPRLFVYHAMSEDALSHQRFEVMERKLYRGIMWPSMIATLITAHFLVDWGDATRHYHDALWFYLKVGLVGLLVIYHLVCGYYRKKLIGNAHYKSHKFWRFFNEMPTLILFAVVILVVVKPQF

SEQ ID NO: 376 - protein, 150 aa, Acinetobacter sp.
MDAPSDAFLWVKALHIIAVVCWFAALFYLPRLYVYHAMSEDAASHQRFEVMERKLYRGIMWPSMIATLITAHFLVDWGDATRHYHEATWFYLKVGLVALLVIYHLVCGYYRKKLIGNAHYKSHKFWRFFNEMPTLILFAVVILVVVKPQF

SEQ ID NO: 377 - protein, 150 aa, Acinetobacter sp.
MDAPSDAFLWVKALHIIAVVCWFAALFYLPRLYVYHAMSEDEISHQRFEVMERKLYRGIMWPSMIATLVTAHLLVEWGDATRHYHEAIWFYLKVGLVGLLVIYHFVCGYYRKKLIGNAHYKSHKFWRFFNEMPTLLLFAIIILVVVKPQF

SEQ ID NO: 378 - protein, 150 aa, Acinetobacter sp.
MDAPSDAFLWVKALHIIAVVCWFAALFYLPRLYVYHAMSDDATSHQRFEVMERKLYRGIMWPSMIATLITAHFLVEWGDATRHYHEATWFYLKIGLVALLVVYHFVCGYYRKKLIGNAHYKSHKFWRFFNEMPTLILFAVVILVVVKPQF

SEQ ID NO: 379 - protein, 150 aa, unidentified
  source 1..150: note = Bacteria
  REGION 1..150: note = Bacteria
MDAPSDAFLWVKALHIIAVVCWFAALFYLPRLYVYHAMSDDAVSHQRFEVMERKLYRGIMWPAMIATLITAHFLVDWGDATRHYHEALWFYLKVGLVGLLVIYHFVCGYYRKKLIGNAHYKSHKFWRFFNEMPTLILFAVVILVVVKPTF

SEQ ID NO: 380 - protein, 150 aa, Acinetobacter sp.
MDAPSDAFLWVKALHIIAVVCWFAALFYLPRLYVYHAMSEDAISHQRFEVMERKLYRGIMWPAMLATLITAHFLVDWGDATRHYHEALWFYLKVGLVGLLVIYHLVCGYYRKKLIGNAHYKSHKFWRYFNEMPTLILFAVVILVVVKPTF

SEQ ID NO: 381 - protein, 150 aa, Acinetobacter sp.
MDAPSDAFLWVKALHIIAVVCWFAALFYLPRLYVYHAMSDDATSHQRFEIMERKLYRGIMWPSMIATLITAHFLVDWGDATRHYHEATWFYLKVGLVALLVIYHLVCGYYRKKLIGNAHYKSHKFWRFFNEMPTLILFAVVILVVVKPQF

SEQ ID NO: 382 - protein, 150 aa, Acinetobacter sp.
MDAPSDAFLWVKALHIIAVVCWFAALFYLPRLYVYHAMSEDAVSHQRFEVMERKLYRGIMWPSMIATLVTAHFLVDWGDATRHYHEALWFYLKVALVGLLVIYHLVCGYYRKKLIGNAHYKSHKFWRFFNEMPTVILFAVVILVVVKPQF

SEQ ID NO: 383 - protein, 150 aa, Acinetobacter sp.
MDAPSDAFLWVKALHIIAVVCWFAALFYLPRLYVYHAMSDDTVSHQRFEVMERKLYRGIMWPSMVATLITAHFLVDWGDATRHYHEALWFYIKVALVGLLVIYHFVCGYYRKKLIGNAHYKSHKFWRFFNEMPTLILFAVVILVVVKPHF

SEQ ID NO: 384 - protein, 150 aa, Acinetobacter sp.
MDAPSDAFLWVKALHIIAVVCWFAALFYLPRLYVYHAMSEDAASHQRFEVMERKLYRGIMWPSMIATLITAHFLVDWGDATRHYHQATWFYLKVGLVALLVIYHLVCGYYRKKLIGNAHYKSHKFWRFFNEMPTLILFAVVILVVVKPQF

SEQ ID NO: 385 - protein, 150 aa, Acinetobacter sp.
MDAPSEAFLWVKALHIIAVVCWFAALFYLPRLFVYHAMSDDNLSHQRFEIMERKLYRGIMWPSMIATLITAHFLVDWGDATRHYHEALWFYLKVGLVGLLVIYHFVCGYYRKKLIGNAHYKSHKFWRFFNEMPTLILFAVVILVVVKPTF

SEQ ID NO: 386 - protein, 150 aa, Acinetobacter sp.
MDAPSDAFLWVKALHIIAVVCWFAALFYLPRLYVYHAMSDDATSHHRFEVMERKLYRGIMWPSMIATLITAHFLVDWGDATRHYHEATWFYLKVGLVALLVIYHLVCGYYRKKLIGNAHYKSHKFWRFFNEMPTLILFAVVILVVVKPQF

SEQ ID NO: 387 - protein, 150 aa, Acinetobacter sp.
MDAPSDAFLWVKALHIIAVVCWFAALFYLPRLYVYHAMSDDATSHQRFEVMERKLYRGIMWPSMIATLITAHFLVEWGDATRHYHEATWFYLKVGLVALLVIYHLVCGYYRKKLIGNAHYKSHKFWRFFNEMPTLILFAVVILVVVKPQF

SEQ ID NO: 388 - protein, 150 aa, Acinetobacter sp.
MDAPSNAFLWVKALHIIAVVCWFAALFYLPRLYVYHAMSDDATSHQRFEVMERKLYRGIMWPSMIATLITAHFLVDWGDATRHYHEATWFYLKVGLVALLVIYHLVCGYYRKKLIGNAHYKSHKFWRFFNEMPTLILFAVVILVVVKPQF

SEQ ID NO: 389 - protein, 150 aa, Acinetobacter sp.
MDAPSDAFLWVKALHIIAVVCWFAALFYLPRLYVYHAMSEDVISHQRFEVMERKLYRGIMWPSMIATLLTAHFLVDWGDATRHYHEALWFYLKVSLVGLLVIYHFVCGYYRKKLIGNAHYKSHRFWRFFNEMPTLLLFAIIILVVVKPQF

SEQ ID NO: 390 - protein, 150 aa, Acinetobacter sp.
MDAPSDAFLWVKALHIIAVVCWFAALFYLPRLYVYHAMSDDATSHQRFEVMERKLYRGIMWPSMIATLITAHFLVDWGDATRHYHEATWFYLKVGLVALLVIYHLVCGYYRKKLIGNAHYKSHKFWRFFNEMPTFILFAVVILVVVKPQF

SEQ ID NO: 391 - protein, 150 aa, Acinetobacter sp.
MDAPSDAFLWVKALHIIAVVCWLAALFYLPRLYVYHAMSDDATSHQRFEVMERKLYRGIMWPSMIATLITAHFLVDWGDATRHYHEATWFYLKVGLVALLVIYHLVCGYYRKKLIGNAHYKSHKFWRFFNEMPTLILFAVVILVVVKPQF

SEQ ID NO: 392 - protein, 150 aa, Acinetobacter sp.
MDAPSDAFLWVKALHIIAVVCWFAALFYLPRLYVYHAMSDDAVSHQRFEVMERKLYRGIMWPSMIATLITAHFLVDWGDATRHYHEALWFYLKVGLVGLLVIYHFVCGYYRKKLIGHAHYKSHKFWRFFNEMPTLILFAVVILVVVKPTF

SEQ ID NO: 393 - protein, 150 aa, Acinetobacter sp.
MDAPSDAFLWVKALHIIAVVCWFAALFYLPRLYVYNAMSDDATSHQRFEVMERKLYRGIMWPSMIATLITAHFLVDWGDATRHYHEATWFYLKVGLVALLVIYHLVCGYYRKKLIGNAHYKSHKFWRFFNEMPTLILFAVVILVVVKPQF

SEQ ID NO: 394 - protein, 150 aa, Acinetobacter sp.
MDAPSDAFLWVKALHIIAVVCWFAALFYLPRLYVYHAMSDDAASHQRFEVMERKLYRGIMWPSMIATLITAHFLVDWGDATRHYHEATWFYLKVGLVALLVIYHLVCGYYRKKLIGNAHYKSHKFWRFFNEMPTLILFAVVILVVVKPQF

SEQ ID NO: 395 - protein, 150 aa, Acinetobacter sp.
MDAPSDAFLWVKALHIIAVVCWFAALFYLPRLYVYHAMSDDAASHQRFEVMERKLYRGIMWPSMIATLITAHFLVEWGDATRHYHEATWFYLKVGLVALLVVYHFVCGYYRKKLIGNAHYKSHKFWRFFNEMPTLILFAVVILVVVKPQF

SEQ ID NO: 396 - protein, 150 aa, Acinetobacter sp.
MDAPSDAFLWVKALHIIAVVCWFAALFYLPRLYVYHAMSEDAASHQRFEVMERKLYRGIMWPSMIATLITAHFLVEWGDATRHYHEATWFYLKVGLVALLVVYHLVCGYYRKKLIGNAHYKSHKFWRFFNEMPTLILFAVVILVVVKPQF

SEQ ID NO: 397 - protein, 150 aa, Acinetobacter sp.
MDAPSDAFLWVKALHIIAVVCWFAALFYLPRLYVYHAMSEDAVSHQRFEVMERKLYRGIMWPAMLATLITAHFLVDWGDATRHYHEALWFYLKVGLVGLLVIYHLVCGYYRKKLINNAHYKSHKFWRYFNEMPTLILFAVVILVVVKPTF

SEQ ID NO: 398 - protein, 150 aa, Acinetobacter sp.
MDAPSDAFLWVKALHIIAVVCWFAALFYLPRLYVYHAMSEDAASHQRFEVMERKLYRGIMWPSMIATLITAHFLVEWGDATRHYHQATWFYLKVGLVALLVIYHLVCGYYRKKLIGNAHYKSHKFWRFFNEMPTLILFAVVILVVVKPQF

SEQ ID NO: 399 - protein, 150 aa, Acinetobacter sp.
MDAPSDAFLWVKALHIIAVVCWFAALFYLQRLYVYHAMSDDATSHQRFEVMERKLYRGIMWPSMIATLITAHFLVDWGDATRHYHEATWFYLKVGLVALLVIYHLVCGYYRKKLIGNAHYKSHKFWRFFNEMPTLILFAVVILVVVKPQF

SEQ ID NO: 400 - protein, 150 aa, Acinetobacter sp.
MDAPSEAFLWVKALHIIAVVCWFAALFYLPRLFVYHAMSDDNLSHQRFEIMERKLYRGIMWPSMIATLITAHFLVDWGDATRHYHEALWFYLKVGLVGLLVIYHFACGYYRKKLIGNAHYKSHKFWRFFNEMPTLILFAVVILVVVKPTF

SEQ ID NO: 401 - protein, 150 aa, Acinetobacter sp.
MDAPSDAFLWVKALHIIAVVCWFAALFYLPRLYVYHAMSEDTASHQRFEVMERKLYRGIMWPSMIATLITAHFLVDWGDATRHYHQATWFYLKVGLVALLVIYHLACGYYRKKLIGNAHYKSHKFWRFFNEMPTLILFAVIILVVVKPQF

SEQ ID NO: 402 - protein, 150 aa, Acinetobacter sp.
MDAPSDAFLWVKALHIIAVVCWFAALFYLPRLYVYHAMSEDAVSHQRFEVMERKLYRGIMWPSLIATLITAHFLVDWGDATRHYHQATWFYLKVGLVALLVIYHLVCGYYRKKLIGNAHYKSHKFWRFFNEMPTLILFAVVILVVVKPQF

SEQ ID NO: 403 - protein, 150 aa, Acinetobacter sp.
MDAPSDAFLWVKALHIIAVVCWFAALFYLPRLYVYHAMSKDAASHQRFEVMERKLYRGIMWPSMIATLITAHFLVDWGDATRHYHQATWFYLKVGLVALLVIYHLVCGYYRKKLIGNAHYKSHKFWRFFNEMPTLILFAVVILVVVKPQF

SEQ ID NO: 404 - protein, 150 aa, Acinetobacter sp.
MDAPSDAFLWVKALHIIAVVCWFAALFYLPRLYVYHAMSEDAVSHQRFEVMERKLYRGIMWPAMLATLITAHFLVDWGDATRHYHEALWFYLKVGLVGLLVIYHLVCGYYRKKLIDNAHYKSHKFWRYFNEMPTLILFAVVILVVVKPTF

SEQ ID NO: 405 - protein, 150 aa, Acinetobacter sp.
MDAPSDAFLWVKALHIIAVVCWFAALFYLPRLYVYHAMSEDAASHQRFEVMERKLYRGIMWPSMIATLITAHFLVEWGDATRHYHQATWFYLKVGLVTLLVIYHLVCGYYRKKLIGNAHYKSHKFWRFFNEMPTLILFAVVILVVVKPQF

SEQ ID NO: 406 - protein, 150 aa, Acinetobacter sp.
MDAPTDAFLWVKALHIIAVVCWFAALFYLPRLYVYHAMSEDTISHQRFEVMERKLYRGIMWPSMIATLITAHFLVDWGDATQHYHQAVWFYLKVALVALLVIYHFVCGYYRKKLIGNAHYKSHKFWRFFNEMPTLILFAVVILVVVKPQF

SEQ ID NO: 407 - protein, 150 aa, Acinetobacter sp.
MDAPSDAFLWVKALHIIAVVCWFAALFYLPRLYVYHAMSDDATSHQRFEVMERKLYRGIMWPSMIATLITAHFLVEWGDATRHYHEATWFYLKVGLVALLVIYNLVCGYYRKKLIGNAHYKSHKFWRFFNEMPTLILFAVVILVVVKPQF

SEQ ID NO: 408 - protein, 150 aa, Acinetobacter sp.
MDAPSDAFLWVKALHIIAVVCWFAALFYLPRLYVYHAMSDDAVSHQRFEVMERKLYRGIMWPSMIATLITAHFLVEWGDATRHYHEALWFYLKVGLVGLLVIYHFVCGYYRKKLIGHAHYKSHKFWRFFNEMPTLILFAVVILVVVKPTF

SEQ ID NO: 409 - protein, 150 aa, Acinetobacter sp.
MDAPSDAFLWVKALHIIAVVCWFAALFYLPRLYVYHAMSEDAASHQRFEVMERKLYRGIMWPSMIATLITAHFLVEWGDATRHYHDATWFYLKVGLVALLVIYHLVCGYYRKKLIGNAHYKSHKFWRFFNEMPTLILFAVVILVVVKPQF

SEQ ID NO: 410 - protein, 150 aa, Acinetobacter sp.
MDAPSDAFLWVKALHIIAVVCWFAALFYLPRLYVYHAMSDDAASHQRFEVMERKLYRGIMWPSMIATLITAHFLVEWGDATRHYHEATWFYLKVGLVALLVIYHLVCGYYRKKLIGNAHYKSHKFWRFFNEMPTLILFAVVILVVVKPQF

SEQ ID NO: 411 - protein, 150 aa, Acinetobacter sp.
MDVPSDAFLWVKALHIIAVVCWFAALFYLPRLYVYHAMSDDATSHQRFEVMERKLYRGIMWPSMIATLITAHFLVEWGDATRHYHEATWFYLKVGLVALLVIYHLVCGYYRKKLIGNAHYKSHKFWRFFNEMPTLILFAVVILVVVKPQF

SEQ ID NO: 412 - protein, 150 aa, Acinetobacter sp.
MDAPSDAFLWVKALHIIAVVCWFAALFYLPRLYVYHAMSEDTVSHQRFEVMERKLYRGIMWPAMLATLITAHFLVDWGDATRHYHEALWFYLKVGLVGLLVIYHLVCGYYRKKLIDNAHYKSHKFWRYFNEMPTLLLFAVVILVVVKPTF

SEQ ID NO: 413 - protein, 150 aa, Acinetobacter sp.
MDAPSDAFLWVKALHIIAVVCWFAALFYLPRLYVYHAMSEDAASHQRFEVMERKLYRGIMWPSMIATLITAHFLVEWGDATRHYHQATWFYLKVGLVALLMIYHLVCGYYRKKLIGNAHYKSHKFWRFFNEMPTLILFAVVILVVVKPQF

SEQ ID NO: 414 - protein, 150 aa, Acinetobacter sp.
MDAPSDAFLWVKALHIIAVVCWFAALFYLPRLYVYHAMSEDAVSHQRFEVMERKLYRGIMWPAMLATLITAHFLVDWGDATRHYHEALWFYLKVGLVGLLVIYHLVCGYYRKKLIDNAHYKSHKFWRYFNEMPTLLLFAVVILVVVKPTF

SEQ ID NO: 415 - protein, 150 aa, Acinetobacter sp.
MDAPSDAFLWVKALHIIAVVCWFAALFYLPRLYVYHAMSEDAVSHQRFEVMERKLYRGIMWPSLIATLITAHFLVDWGDATRHYHQATWFYLKVGLVALLVIYHLACGYYRKKLIGNAHYKSHKFWRFFNEMPTLILFAVVILVVVKPQF

SEQ ID NO: 416 - protein, 150 aa, Acinetobacter sp.
MDAPSDAFLWVKALHIIAVVCWFAALFYLPRLYVYHAMSEDAASHQRFEIMERKLYRGIMWPSMIATLITAHFLVEWGDATRHYHQATWFYLKVGLVALLVIYHLVCGYYRKKLIGNAHYKSHRFWRFFNEMPTLILFAVVILVVVKPQF

SEQ ID NO: 417 - protein, 150 aa, Acinetobacter sp.
MDAPSDAFLWVKALHIIAVVCWFAALFYLPRLYVYHAMSEDAVSHQRFEVMERKLYRGIMWPAMLATLITAHFLVDWGDATRHYHEALWFYLKVGLVGLLVIYHLICGYYRKKLINNAHYKSHKFWRYFNEMPTLILFAVVILVVVKPTL

SEQ ID NO: 418 - protein, 150 aa, Acinetobacter sp.
MDAPSDAFLWVKALHIIAVVCWFAALFYLPRLYVYHAMSDDAISHQRFEVMERKLYRGIMWPAMIATLITAHFLVDWGDATRHYHEALWFYLKVGLVGLLVIYHLMCGYYRKKLIDNAHYKSHKFWRYFNEMPTLILFAVVILVVVKPTF

SEQ ID NO: 419 - protein, 150 aa, Acinetobacter sp.
MDAPSDAFLWVKALHIIAVVCWFAALFYLPRLYVYHAMSEDAASHQRFEIMERKLYRGIMWPSMIATLITAHFLVEWGDATRHYHQATWFYLKVALVALLVIYHLVCGYYRKKLIGNAHYKSHKFWRFFNEMPTLILFAVVILVVVKPQF

SEQ ID NO: 420 - protein, 150 aa, Acinetobacter sp.
MDAPSDAFLWVKALHIIAVVCWFAALFYLPRLYVYHAMSDDAVSHQRFEVMERKLYRGIMWPSMIATLITAHFLVDWGDATRHYHEALWFYLKVGLVGLLVIYHFVCGYYRKKLIRHAHYKSHKFWRFFNEMPTLILFAVVILVVVKPTF

SEQ ID NO: 421 - protein, 150 aa, Acinetobacter sp.
MDAPSDAFLWVKALHIIAVVCWFAALFYLPRLYVYHAMSEDTVSHERFQVMERKLYRGIMWPAMVATLITAHFLVDWGDATRHYHEALWFYLKVGLVGLLVIYHLVCGYYRKKLIENAHYKSHKFWRFFNEMPTLILFAVVILVVVKPTF

SEQ ID NO: 422 - protein, 150 aa, Acinetobacter sp.
MDAPSDAFLWVKALHIIAVVCWFAALFYLPRLYVYHAMSEDAASHQRFEVMERKLYRGIMWPSMIATLITAHFLVEWGDATRHYHQATWFYLKVALVALLVIYHLVCGYYRKKLIGNAHYKSHRFWRFFNEMPTLILFAVVILVVVKPQF

SEQ ID NO: 423 - protein, 150 aa, Acinetobacter sp.
MDAPSDAFLWVKALHIIAVVCWFAALFYLPRLYVYHAMSEDAVSHQRFEVMERKLYRGIMWPSLIATLITAHFLVDWGDATRHYHQATWFYLKVALVALLVIYHLACGYYRKKLIGNAHYKSHKFWRFFNEMPTLILFAVVILVVVKPQF

SEQ ID NO: 424 - protein, 150 aa, Acinetobacter sp.
MDAPSDAFLWVKALHIIAVVCWFAALFYLPRLYVYHAMSEDAVSHQRFEVMERKLYRGIMWPAMLATLITAHFLVDWGDATRHYHEALWFYLKVGLVGLLVIYHLVCGHYRKKLMENAHYKSHKFWRYFNEMPTLILFAVVILVVVKPTF

SEQ ID NO: 425 - protein, 150 aa, Acinetobacter sp.
MDAPSDAFLWVKALHIIAVVCWFAALFYLPRLYVYHAMSEDVVSHQRFEIMERKLYRGIMWPAMVATLITAHFLVDWGDATRHYHEALWFYLKVGLVGLLVIYHLVCGYYRKKLMENAHYKSHKFWRFFNEMPTLILFAVVILVVVKPTF

SEQ ID NO: 426 - protein, 150 aa, Acinetobacter sp.
MDAPSDAFLWVKALHIIAVVCWFAALFYLPRLYVYHAMSEDAASHQRFEVMERKLYRGIMWPSMIATLITAHFLVEWGDATRHYHQATWFYLKVALVALLIIYHLVCGYYRKKLIGNAHYKSHRFWRFFNEMPTLILFAVVILVVVKPQF

SEQ ID NO: 427 - protein, 150 aa, Acinetobacter sp.
MDAPSDAFLWVKALHIIAVVCWFAALFYLPRLYVYHAMSEDAASHQRFEIMERKLYRGIMWPSMIATLITAHFLVEWGDATRHYHQATWFYLKVALVALLVIYHLVCGYYRKKLIGNAHYKSHRFWRFFNEMPTLILFAVVILVVVKPQF

SEQ ID NO: 428 - protein, 150 aa, Acinetobacter sp.
MDAPTDAFLWVKALHIIAVVCWFAALFYLPRLYVYHAMSEDTISHQRFEVMERKLYRGIMWPSMIATLITAHFLVDWGDGTQHYHQAGWFYLKVALVALLVIYHFVCGYYRKKLIGNAHYKSHKFWRFFNEMPTLILFAVVILVVVKPQF

SEQ ID NO: 429 - protein, 150 aa, Acinetobacter sp.
MDAPSDAFLWVKALHIIAVVCWFAALFYLPRLYVYHAMSEDAASHQRFEIMERKLYRGIMWPSLIATLITAHFLVDWGDATRHYHQATWFYLKVALVALLVIYHLACGYYRKKLIGNAHYKSHKFWRFFNEMPTLILFAVVILVVVKPQF

SEQ ID NO: 430 - protein, 150 aa, Acinetobacter sp.
MDAPSDAFLWVKALHIIAVVCWFAALFYLPRLYVYHAMSEDVVSHQRFEIMERKLYRGIMWPAMVATLITAHFLVDWGDATRHYHEALWFYLKVGLVGLLVIYHLICGYYRKKLMENAHYKSHKFWRFFNEMPTLILFAVVILVVVKPTF

SEQ ID NO: 431 - protein, 150 aa, Acinetobacter sp.
MDAPSDAFLWVKALHIIAVVCWFAALFYLPRLYVYHAMSEDAASHQRFEVMERKLYRGIMWPSMIATLITAHFLVEWGDATRHYHQATWFYLKVALVALLVIYHLVCGYYRKKLIGNAHYKSHRFWRFFNEMPTVILFAVVILVVVKPQF

SEQ ID NO: 432 - protein, 150 aa, Acinetobacter sp.
MDAPSDAFLWVKALHIIAVVCWFAALFYLPRLYVYHAMSEDTLSHQRFEIMERKLYRGIMWPSMIATLITAHFLVDWGDATRNYHDALWFYLKVALVGLLVIYHLVCGYYRQKLIGNAHYKSHKFWRFFNEMPTVLLLAIVILVVVKPQF

SEQ ID NO: 433 - protein, 150 aa, Acinetobacter sp.
MDAPSDAFLWVKALHIIAVVCWFAALFYLPRLYVYHAMSEDAVSHARFQVMERKLYRGIMWPAMLATLITAHFLVDWGDATRHYHEAVWFYLKVGLVGLLVIYHLVCGHYRKKLMENAHYKSHKFWRYFNEMPTLILFAVVILVVVKPTF

SEQ ID NO: 434 - protein, 150 aa, Acinetobacter sp.
MDAPSDAFLWVKALHIIAVVCWFAALFYLPRLYVYHAMSEDAVSHQRFEVMERKLYRGIMWPSMIATLITAHFLVDWGDATRNYHDALWFYLKVALVGLLVIYHLVCGYYRLKLIGNAHYKSHKFWRFFNEMPTVLLFAIVILVVVKPVF

SEQ ID NO: 435 - protein, 150 aa, Acinetobacter sp.
MDAPSDAFLWVKALHIIAVVCWFAALFYLPRLYVYHAMSEDAVSHQRFEVMERKLYRGIMWPSMIATLITAHFLVDWGDATRHYHEALWFYLKVGLVGLLVIYHLVCGYYRKKLIGNAHYKTHKFWRFFNEMPTLILFAVVVLVVVKPQF

SEQ ID NO: 436 - protein, 150 aa, Acinetobacter sp.
MDAPSSAFLWVKALHIIAVVCWFAALFYLPRLYVYHAMSKDQASYERFQIMERKLYRGIMWPAMIATLITAHFLVDWGDATRHYHEALWFYFKVGLVGLLIIYHFVCGYYRKKLIDNAHYKTHKFWRMFNELPTVILFAVVILVVVKPQF

SEQ ID NO: 437 - protein, 149 aa, Acinetobacter sp.
MNAPSDAFFWIKALHIIAVVCWFAALFYLPRLYVYHAMSDDTVSHQRFEVMERKLYRGIMWPAMIATLITAHFLVDWGDQFYHYHEALWFYLKVALVGLLVIYHFVCGYYRKKLIGNAHYKTHKFWRFFNEMPTLLLFAIVILVVVKPF

SEQ ID NO: 438 - protein, 150 aa, Acinetobacter sp.
MDAPSDAFLWVKALHIIAVVCWFAALFYLPRLYVYHAMSEDTVSHQRFEVMERKLYRGIMWPSMIATLITAHFLVDWGDATRHYHEALWFYLKVGLVGLLVIYHFVCGYYRKKLIGNAHYKSHKFWRFFNEMPTLILLAVVILVVVKPQF

SEQ ID NO: 439 - protein, 142 aa, Acinetobacter sp.
MWVKALHIIAVVCWFAALFYLPRLYVYHAMSDDATSHQRFEVMERKLYRGIMWPSMIATLITAHFLVDWGDATRHYHEATWFYLKVGLVALLVIYHLVCGYYRKKLIGNAHYKSHKFWRFFNEMPTLILFAVVILVVVKPQF

SEQ ID NO: 440 - protein, 150 aa, Acinetobacter sp.
MDAPSDAFLWVKALHIIAVVCWFAALFYLPRLYVYHAMSDDAVSHQRFEVMERKLYRGIMWPSMIATLITAHFLVDWGDATRHYHEALWFYLKVGLVGLLVIYHFVCGYYRKKLIGNAHYKSHKFWRFFNEMPTLILVAVIILVVVKPQF

SEQ ID NO: 441 - protein, 150 aa, Acinetobacter sp.
MDAPSDAFLWVKALHIIAVVCWFAALFYLPRLYVYHAMSEDAVSHQRFEVMERKLYRGIMWPSMIATLVTAHFLVDWGDATRHYHEALWFYLKVALVGLLVIYHLVCGYYRKKLIGNAHYKSHKFWRFFNEMPTVILLAVVILVVVKPQF

SEQ ID NO: 442 - protein, 150 aa, Acinetobacter sp.
MDAPSDAFLWVKALHIIAVVCWFAALFYLPRLYVYHAMSEDGTSHQRFQIMERKLYRGIMWPSMLATLITAHFLVDWGDATRHYHEALWFYLKVGLVGLLVIYHFVCGYYRKKLMENPHYKSHKFWRFFNEMPTLILLAVVILVVVKPQF

SEQ ID NO: 443 - protein, 150 aa, Acinetobacter sp.
MNAPSEAFLWVKALHIIAVVCWFAALFYLPRLYVYHAMSDDDASHQRFEVMERKLYRGIMWPAMIATLITAHFLVDWGDATYHYHEALWFYLKVGLVGLLVIYHFVCGYYRKKLIGNAHYKSHKFWRVFNEMPTLILLAVVILVVVKPTF

SEQ ID NO: 444 - protein, 148 aa, Acinetobacter sp.
MVSEAFLWVKALHIIAVVCWFAALFYLPRLYVYHAMSDDLASHQRFEVMERKLYRGIMWPAMIATLITAHFLVDWGDATQHYHEATWFYIKVALVGLLVIYHFVCGYYRKKLIGNAHYKSHKFWRFFNEMPTLLLLAIVILVVVKPQF

SEQ ID NO: 445 - protein, 150 aa, Acinetobacter sp.
MNAPSDAFLWVKALHIIAVVCWFAALFYLPRLYVYHAMSDDAISHQRFQVMERKLYRGIMWPAMIATLITAHFLVAWGDATQHYHLAHWFYVKVALVGLLVIYHFVCGYYRKKLIENAHYKSHKFWRFFNEMPTVILLAVVILVVVKPQF

SEQ ID NO: 446 - protein, 150 aa, Acinetobacter sp.
MNAPSDAFLWVKALHIIAVVCWFAALFYLPRLYVYHAMSDDAISHQRFQVMERKLYRGIMWPAMIATLITAHFLVAWGDATQHYHLAHWFYLKVALVGLLVIYHFVCGYYRKKLIENAHYKSHKFWRFFNEMPTVILLAVVILVVVKPQF

SEQ ID NO: 447 - protein, 150 aa, Acinetobacter sp.
MDVPSDAFLWVKAFHIISIVCWFAALFYLPRLYVYHAMSNDAVSHQRFQVMERKLYRGIMWPSMIATLITAHFLVDWGDATQHYHEALWFYLKLGLVGLLVIYHLFCGYYRQKLILDAHYKSHKFWRFFNEMPTFILVAVIILVVVKPHF

SEQ ID NO: 448 - protein, 181 aa, Escherichia sp.
MKTLILFSTRDGQTREIASYLASELKELGIQADVANVHRIEEPQWENYDRVVIGASIRYGHYHSAFQEFVKKHATRLNSMPSAFYSVNLVARKPEKRTPQTNSYARKFLMNSQWRPDRCAVIAGALRYPRYRWYDRFMIKLIMKMSGGETDTRKEVVYTDWEQVANFAREIAHLTDKPTLK

SEQ ID NO: 449 - protein, 181 aa, Escherichia sp.; identical to SEQ ID NO: 448

SEQ ID NO: 450 - protein, 181 aa, Enterobacter sp.
MKTLILFSTRDGQTREIASYLASELKELGIQADVTNVHRIEEPQWENYDRVVIGASIRYGHYHSAFQEFVKKHATRLNSMPSAFYSVNLVARKPEKRTPQTNSYARKFLMNSQWRPDRCAVIAGALRYPRYRWYDRFMIKLIMKMSGGETDTRKEVVYTDWEQVANFAREIAHLTDKPTLK

SEQ ID NO: 451 - protein, 181 aa, Shigella sp.
MKTLILFSTRDGQTREIASYLASELKELGIQTDVANVHRIEEPQWENYDRVVIGASIRYGHYHSAFQEFVKKHATRLNSMPSAFYSVNLVARKPEKRTPQTNSYARKFLMNSQWRPDRCAVIAGALRYPRYRWYDRFMLKLIMKMSGGETDTRKEVVYTDWEQVANFAREIAHLTDKPTLK

SEQ ID NO: 452 - protein, 181 aa, Escherichia sp.
MKTLILFSTRDGQTREIAAYLASELKELGIQADVANVHRIEEPQWENYDRVVIGASIRYGHYHSAFQEFVKKHATRLNSMPSAFYSVNLVARKPEKRTPQTNSYARKFLMSSQWRPDRCAVIAGALRYPRYRWYDRFMIKLIMKMSGGETDTRKEVVYTDWEQVANFAREIAHLTDKPTLK

SEQ ID NO: 453 - protein, 180 aa, Shigella sp.
MKTLILFSTRDGQTREISSYLASELKELGIQTDVANVHRIEEPQWENYDRVVIGASIRYGHYHSAFQEFVKKHATRLNSMPSAFYSVNLVARKPEKRTPQTNSYARKFLMNSQWRPDRCAVIAGALRYPRYRWYDRFMLKLIMKMSGGETDTRKEVVTDWEQVANFAREIAHLTDKPTLK

SEQ ID NO: 454 - protein, 181 aa, Escherichia sp.
MKTLILFSTRDGQTREIASYLASELKELGIQADVANVHRTEEPQWENYDRVVIGASIRYGHYHSAFQEFVKKHATRLNSMPSAFYSVNLVARKPEKRTPQTNSYARKFLMSSQWRPDRCAVIAGALRYPRYRWYDRFMIKLIMKMSGGETDTRKEVVYTDWEQVANFAREIAHLTDKPTLK

SEQ ID NO: 455 - protein, 181 aa, Escherichia sp.
MKTLILFSTRDGQTREIASYLASELKELGIQADVANVHRIEEPQWENYDRVVIGASIRYGHYHSAFQEFVKKHATQLNSMPSAFYSVNLVARKPEKRTPQTNSYARKFLMNSQWRPDRCAVIAGALRYPRYRWYDRFMIKLIMKMSGGETDTRKEVVYTDWEQVANFAREIAHLTDKPTPK

SEQ ID NO: 456 - protein, 181 aa, Shigella sp.
MKTLILFSTRDGQTREIASYLASELKELGIQTDVANVHRIEEPQWENYGRVVIGASIRYGHYHSAFQEFVKKHATRLNSMPSAFYSVNLVARKPEKRTPQTNSYARKFLMNSQWRPDRCAVIAGALRYPRYRWYDRFMLKLIMKMSGGETDTRKEVVYTDWEQVANFAREIAHLTDKPTLK

SEQ ID NO: 457 - protein, 181 aa, Escherichia sp.
MKTLILFSTRDGQTREIASYLASELKELGIQADVANVHRIEEPQWENYDRVVIGASIRYGHYHSAFQEFVKKHATRLNSMPSAFYSVNLVARKPEKRTPQTNSYARKFLMSSQWRPDRCAVIAGALRYPRYRWYDRFMIKLIMKMSGGETDTRKEVVYTDWQQVENFAREIAHLTDKPTLK

SEQ ID NO: 458 - protein, 181 aa, Shigella sp.
MKTLILFSTRDGQTREIASYLASELKELGIQTDVANVHRIEEPQWENYDRVVIGASIRYGHYHSAFQEFVKKHATRLNSMPSAFYSVNLVARKPEKRTPQTNSYARKFLMNSQWRPDRCAVIAGALRYPRYRWYDRFMIKLIMKMSGGETDTRKEVVYTDWEQVANFAREIAQLTNKPTLK

SEQ ID NO: 459 - protein, 181 aa, Escherichia sp.
MKTLILFSTRDGQTREIASYLASELKELGIQADVANVHRTEEPQWENYDRVVIGASIRYGHYHSAFEEFVKKHETRLNSMPSAFYSVNLVARKPEKRTPQTNSYARKFLMSSQWRPDRCAVIAGALRYPRYRWYDRFMIKLIMKMSGGETDTRKEVVYTDWEQVANFAREIAHLTDKPTLK

SEQ ID NO: 460 - protein, 181 aa, Escherichia sp.
MKTLILFSTRDGQTREIASYLASELKELGILADVANVHRTEEPQWENYDRVVIGASIRYGHYHSAFQEFVKKHATRLNSMPSAFYSVNLVARKPEKRTPQTNSYARKFLMSSQWRPDRCAVIAGALRYPRYRWYDRFMIKLIMKMSGGETDTRKEVVYTDWEQVANFAREIAHLTDKPTMK

SEQ ID NO: 461 - protein, 181 aa, Enterobacter sp.
MKTLILFSTRDGQTREIASYLASELKELGIQTDVANVHRIEEPQWENYDRVVIGASIRYGHYHSAFQEFVKKHATRLNSMPSAFYSVNLVARKPEKRTPQTNSYARKFLMSSQWRPDRCAVIAGALRYPRYRWYDRFMIKLIMKMSGGETDTRKEVVYTDWEQVANFAREIAQLTNKPTLK

SEQ ID NO: 462 - protein, 181 aa, Shigella sp.
MKTLILFSTRDGQTREIASYLASELKELGIQTDVANVHRIEEPQWKNYDRVVIGASIRYGHYHSAFQEFVKKHATRLNSMPSAFYSVNLVARKPEKRTPQTNSYARKFLMSSQWRPDRCAVIAGALRYPRYRWYDRFMIKLIMKMSGGETDTRKEVVYTDWEQVANFAREIAQLTNKPTLK

SEQ ID NO: 463 - protein, 181 aa, Shigella sp.
MKTLILFSTRDGQTREIASYLASELKELGIQTDVANVHRIEEPQWENYDRVVIGASIRYGHYHSAFQEFVKKHATRLNSMPSAFYSVNLVARKPEKRTPQTNSYARKFLMSSQWRPDRCAVIAGALRYPRYCWYDRFMIKLIMKMSGGETDTRKEVVYTDWEQVANFAREIAQLTNKPTLK

SEQ ID NO: 464 - protein, 181 aa, Salmonella sp.
MKTLILFSTRDGQTREIASYLASELKEMGIWADVVNLHRAEEPDWDSYDRVVIGASIRYGHYHSAFQEFVKKYATRLNGMPSAFYSVNLVARKAEKRTPQTNSYARKFLMSSPWRPDYCAVIAGALRYPRYRWYDRLMIKLIMKMSGGETDTRKEVVYTDWEQVANFAREIAHLTNKSSAK

SEQ ID NO: 465 - protein, 161 aa, Shigella sp.
MASELKELGIQADVANVHRIEEPQWENYDRVVIGASIRYGHYHSAFQEFVKKHATRLNSMPSAFYSVNLVARKPEKRTPQTNSYARKFLMNSQWRPDRCAVIAGALRYPRYRWYDRFMIKLIMKMSGGETDTRKEVVYTDWEQVANFAREIAHLTDKPTLK

SEQ ID NO: 466 - protein, 181 aa, Citrobacter sp.
MKTLILFSTRDGQTREIASYLASELKELGIWADVVNLHRTEEPEWDSYDRVVIGASIRYGHYHTAFQEFVKKHATRLNGMPSAFYSVNLVARKPEKRTPQTNSYARKFLMSSQWRPDRCAVIAGALLYPRYRWYDRIMIKLIMKMSGGETDTNKEVIYTDWEQVAGFAREIAQLTVKSPVK

SEQ ID NO: 467 - protein, 181 aa, Salmonella sp.
MKTLILFSTRDGQTREIASYLASELKEMGIWADVVNLHRAEEPDWDSYDRVVIGASIRYGHYHSAFQEFVKKYATRLNGMPSAFYSVNLVARKAEKRTPQTNSYARKFLMSSPWRPDHCAVIAGALRYPRYRWYDRLMIKLIMKMSGGETDTSKEVVYTDWEQVANFAREIAHLTNKSSAK

SEQ ID NO: 468 - protein, 181 aa, Citrobacter sp.
MKTLILFSTRDGQTREIASYLASELKELGIWADVINLHRTEELDWQSYDRVVIGASIRYGHYHAAFQEFVKKHATRLNAMPSAFYSVNLVARKPEKRTPQTNSYARKFLMSSQWRPDLCAVIAGALRYPRYRWYDRLMIKLIMKMSGGETDTSKEVVYTDWEQVANFARDIAQLTNKSLAK

SEQ ID NO: 469 - protein, 181 aa, Salmonella sp.
MKTLILFSTRDGQTREIASYLASELKEMGIWADVVNLHRAEEPDWDSYDRVVIGASIRYGHYHSAFQEFVKKYATRLNGMPSAFYSVNLVARKAEKRTPQTNSYARKFLMSSPWRPDHCAVIAGALRYPRYRWYDRLMIKLIMKMSGGETDTSKEVVYTDWDQVANFAREIAHLTNKSSAK

SEQ ID NO: 470 - protein, 181 aa, Salmonella sp.
MKTLILFSTRDGQTREIASYLASELKEMGIWADVVNLHRAEEPDWDSYDRVVIGASIRYGHYHSAFQEFVKKYATRLNGMPSAFYSVNLVARKAEKRTPQTNSYARKFLMSSPWRPDHCAVIAGALRYPRYRWYDRLMIKLIMKLSGGETDTSKEVVYTDWEQVANFAREIAHLTNKSSAK

SEQ ID NO: 471 - protein, 181 aa, Salmonella sp.
MKTLILFSTRDGQTREIASYLASELKEMGIWADVVNLHRAEEPDWDKYDRVVIGASIRYGHYHSAFQEFVKKYSTRLNGMPSAFYSVNLVARKPEKRTPQTNSYARKFLMNSPWRPDHCAVIAGALRYPCYRWYDRLMIKLIMKMSGGETDTSKEVVYTDWDQVAKFAREIAHLTNKPSSK

SEQ ID NO: 472 - protein, 181 aa, Citrobacter sp.
MKTLILFSTRDGQTREIASYLASELKELGIWADVINLHRTEELDWQSYDRVVIGASIRYGHYHAAFQEFVKKHATRLNAMPSAFYSVNLVARKPEKRTPQTNSYARKFLMSAQWRPDLCAVIAGALRYPRYRWYDRLMIKLIMKMSGGETDTSKEVVYTDWEQVANFARDIAQLTNKSLAK

SEQ ID NO: 473 - protein, 181 aa, Salmonella sp.
MKTLILFSTRDGQTREIASYLASELKEMGIRADVVNLHRAEEPDWDSYDRVVIGASIRYGHYHSAFQEFVKKYATRLNGMPSAFYSVNLVARKAEKRTPQTNSYARKFLMSSPWRPDYCAVIAGALRYPRYRWYDRLMIKLIMKMSGGETDTSKEVVYTDWEQVAHFAREIAHLTNKSSAK

SEQ ID NO: 474 - protein, 181 aa, Citrobacter sp.
MKTLILFSSRDGQTREIAAYLASELKELGIWADVFNLHRTEEPDWESYDRVVIGASIRYGHYHSAFLDFVKKHATRLNQMPSAFYSVNLVARKPEKRTPQTNSYARKFLMHSQWRPDRSAVIAGALLYPRYRWYDRIMIKLIMKMSGGETDTRKEVIYTDWEQVASFAREIAQLTDKSSVK

SEQ ID NO: 475 - protein, 181 aa, Salmonella sp.
MKTLILFSTRDGQTREIASYLASELKEMGIWADVVNLHRAEEPDWDKYDRVVIGASIRYGHYHSAFQEFVKKYATRLNGMPSAFYSVNLVARKPEKRTPQTNSYARKFLMSSPWRPDHCAVIAGALRYPCYRWYDRLMIKLIMKMSGGETDTSKEVVYTDWDQVAKFAREIAHLTNKPSSK

SEQ ID NO: 476 - protein, 181 aa, Citrobacter sp.
MKTLILFSTRDGQTREIASYLASELKALGIWADVINLHRTEELDWQSYDRVVIGASIRYGHYHAAFQEFVKKHATRLNAMPSAFYSVNLVARKPEKRTPQTNSYARKFLMSSQWRPDLCAVIAGALRYPRYRWYDRLMIKLIMKMSGGETDTSKEVVYTDWEQVANFARDIAQLTNKSLAK

SEQ ID NO: 477 - protein, 181 aa, Salmonella sp.
MKTLILFSTRDGQTREIASYLASELKEMGIWADVVNLHRAEEPDWDSYDRVVIGASIRYGHYHSAFQEFVKKYATRLNGMPSAFYSVNLVARKAEKRTPQTNSYARKFLMSSPWRPDYCAVIAGALRYPRYRWYDRLMIKLIMKMSGGETDTSKEVVYTDWEQVAHFAREIAHLTNKSSAK

SEQ ID NO: 478 - protein, 181 aa, Salmonella sp.
MKTLILFSTRDGQTREIASYLASELKEMGIWADVVNLHRAEEPDWDCYDRVVIGASIRYGHYHSAFQEFVKKYATRLNGMPSAFYSVNLVARKAEKRTPQTNSYARKFLMSSPWRPDYCAVIAGALRYPRYRWYDRLMIKLIMKMSGGETDTSKEVVYTDWEQVAHFAREIAHLTNKSSAK

SEQ ID NO: 479 - protein, 181 aa, Salmonella sp.
MKTLILFSTRDGQTREIASYLASELKEMGIWADVVNLHRAEEPDWDSYDRVVIGASIRYGHYHSAFQEFVKKYATRLNGMPSAFYSVNLVSRKAEKRTPQTNSYARKFLMSSPWRPDYCAVIAGALRYPRYRWYDRLMIKLIMKMSGGETDTSKEVVYTDWEQVAHFAREIAHLTNKSSAK

SEQ ID NO: 480 - protein, 181 aa, Salmonella sp.
MKTLILFSTRDGQTREIASYLASELKDMGIWADVVNLHRAEEPDWDSYDRVVIGASIRYGHYHSAFQEFVKKYATRLNGMPSAFYSVNLVARKAEKRTPQTNSYARKFLMSSPWRPDYCAVIAGALRYPRYRWYDRLMIKLIMKMSGGETDTSKEVVYTDWEQVAHFAREIAHLTNKSSAK

SEQ ID NO: 481 - protein, 181 aa, Salmonella sp.
MKTLILFSTRDGQTREIASYLASELKEMGIWGDVVNLHRAEEPDWDSYDRVVIGASIRYGHYHSAFQEFVKKYATRLNGMPSAFYSVNLVARKAEKRTPQTNSYARKFLMSSPWRPDYCAVIAGALRYPRYRWYDRLMIKLIMKMSGGETDTSKEVVYTDWEQVAHFAREIAHLTNKSSAK

SEQ ID NO: 482 - protein, 181 aa, Salmonella sp.
MKTLILFSTRDGQTREIASYLASELKEMGIWADVVNLHRAEEPDWDSYDRVVIGASIRYGHYHSAFQEFVKKYATRLNGMPSAFYSVNLVARKAEKRTPQTNSYARKFLMSSPWRPDYCAVIAGALRYPRYRWYDRLMIKFIMKMSGGETDTSKEVVYTDWEQVAHFAREIAHLTNKSSAK

SEQ ID NO: 483 - protein, 181 aa, Salmonella sp.
MKTLILFSTRDGQTREIASYLASELKEMGIWADVVNLHRAEEPDWDSYDRVVIGASIRYGHYHSAFQEFVKKYATRLNGMPSAFYSVNLVARKAEKRTPQTNSYARKFLMSSPWRPDYCAVIAGALRYPRYRWYDRLMIKLIMKMSGGETDTSKEAVYTDWEQVAHFAREIAHLTNKSSAK

SEQ ID NO: 484 - protein, 181 aa, Salmonella sp.
MKTLILFSTRDGQTREIASYLASELKEMGIWADVVNLHRAEEPDWDSYDRVVIGASIRYGHYHSAFQEFVKKYATRLNGMPSAFYSVNLVARKAEKRTPQTNSYARKFLMSSPWRPDYCAVIAGALRYPRYRWYDRLMIKLIMKMSGGETDTSKEVVYTDWEQVTHFAREIAHLTNKSSAK

SEQ ID NO: 485 - protein, 181 aa, Salmonella sp.
MKTLILFSTRDGQTHEIASYLASELKEMGIWADVVNLHRAEEPDWDSYDRVVIGASIRYGHYHSAFQEFVKKYATRLNGMPSAFYSVNLVARKAEKRTPQTNSYARKFLMSSPWRPDYCAVIAGALRYPRYRWYDRLMIKLIMKMSGGETDTSKEVVYTDWEQVAHFAREIAHLTNKSSAK

SEQ ID NO: 486 - protein, 181 aa, Salmonella sp.
MKTLILFSTRDGQTREIASYLASELKEMGIWADVVNLHRAEEPDWDSYDRVVIGASIRYGHYHSAFQEFVKKYAKRLNGMPSAFYSVNLVARKAEKRTPQTNSYARKFLMSSPWRPDYCAVIAGALRYPRYRWYDRLMIKLIMKMSGGETDTSKEVVYTDWEQVAHFAREIAHLTNKSSAK

SEQ ID NO: 487 - protein, 181 aa, Salmonella sp.
MKTLILFSTRDGQTREIASYLASELKEMGIWADVVNLHRAEEPDWDSYDRVVIGASIRYGHYHSAFQEFVKKYATRLNGMPSAFYSVNLVARKAEKRTPQTNSYARKFLMSSPWRPDYCAVIAGALRYPRYRWYDRLMIKLIMQMSGGETDTSKEVVYTDWEQVTHFAREIAHLTNKSSAK

SEQ ID NO: 488 - protein, 181 aa, Salmonella sp.
MKTLILFSTWDGQTREIASYLASELKEMGIWADVVNLHRAEEPDWDSYDRVVIGASIRYGHYHSAFQEFVKKYATRLNGMPSAFYSVNLVARKAEKRTPQTNSYARKFLMSSPWRPDYCAVIAGALRYPRYRWYDRLMIKLIMKMSGGETDTSKEVVYTDWEQVAHFAREIAHLTNKSSAK

SEQ ID NO: 489 - protein, 181 aa, Salmonella sp.
MKTLILFSTRDGQTREIASYLASELKEMGIWADVVNLHRAEEPDWDKYDRVVIGASIRYGHYHSAFQEFVKKYATRLNGMPSAFYSVNLVARKPEKRTPQTNSYARKFLMSSPWRPDYCAVIAGALRYPCYRWYDRLMIKLIMKMSGGETDTSKEVVYTDWDQVAKFAREIAHLTNKLSSK

SEQ ID NO: 490 - protein, 181 aa, Salmonella sp.
MKTLILFSTRDGQTREIASYLASELKEMGIWGDVVNLHRAEEPDWDSYDRVVIGASIRYGHYHSAFQEFVKKYATRLNGMPSAFYSVNLVARKAEKRTPQTNSYARKFLMSSPWRPDYCAVIAGALRYPSYRWYDRLMIKLIMKMSGGETDTSKEVVYTDWEQVAHFAREIAHLTNKSSAK

SEQ ID NO: 491 - protein, 181 aa, Salmonella sp.
MKTLILFSTRDGQTREIASYLASELKEMGIWADVVNLHRAEEPDWDSYDRVVIGASIRYGHYHSAFQEFVKKYATRLNGMPSAFYSVNLVARKAEKRTPQTNSYARKFLMSSPWRPDYCAVIAGALRYPRYRWYDRLMIKLIMKMSGGETDTSKEVVYTDWEQVTHFAREIAHLNNKSSAK

SEQ ID NO: 492 - protein, 181 aa, Salmonella sp.
MKILILFSTRDGQTREIASYLASELKEMGIWADVVNLHRAEEPDWDSYDRVVIGASIRYGHYHSAFQEFVKKYAPRLNGMPSAFYSVNLVARKAEKRTPQTNSYARKFLMSSPWRPDHCAVIAGALRYPRYRWYDRLMIKLIMKMSGGETDTSKEVVYTDWDQVANFAREIAHLTNKSSAK

SEQ ID NO: 493 - protein, 181 aa, Citrobacter sp.
MKTLILFSSRDGQTREIAAYLASELKELGICTDVVNLHRIEEPDWERYDRVVIGASIRYGHYHSAFLEFVKKHATRLNHMPSAFYSVNLVARKPEKRTPQTNSYARKFLMNSQWRPDRSAVIAGALLYPRYRWYDRMMIQLIMKMSGGETDTRKEVIYTDWEQVASFAREVAQLTPDSLVK

SEQ ID NO: 494 - protein, 176 aa, Salmonella sp.
MKTLILFSTRDGQTREIASYLASELKEMGIWADVVNLHRAEEPDWDSYDRVVIGASIRYGHYHSAFQEFVKKYATRLNGMPSAFYSVNLVARKAEKRTPQTNSYARKFLMSSPWRPDYCAVIAGALRYPRYRWYDRLMIKLIMKMSGGETDTSKEVVYTDWEQVAHFAREIAHLTN

SEQ ID NO: 495 - protein, 181 aa, Salmonella sp.
MKTLILFSTRDGQTREIASYLASELKEMGIWADVVNLHRAEEPDWDSYDRVVIGASIRYGHYHSAFQEFVKKYATRLNGMSSAFYSVNLVARKAEKRTPQTNSYARKFLMSSPWRPDYCAVIAGALRYPRYRWYDRLMIKLIMKMSGGETDTSKEVVYTDWEQVTHFAREIAHLTNKSSAK

SEQ ID NO: 496 - protein, 181 aa, Salmonella sp.
MKTLILFSTRDGQTREIASYLASELKEMGIWADVVNLHRAEELDWDSYDRVVIGASIRYGHYHSSFQEFVKKYATRLNGMPSAFYSVNLVARKAEKRTPQTNSYARKFLMSSPWRPDYCAVIAGALRYPRYRWYDRLMIKLIMKMSGGETDTSKEVVYTDWEQVAHFAREIAHLTNKSSAK

SEQ ID NO: 497 - protein, 181 aa, Citrobacter sp.
MKTLILFSSRDGQTREIAEYLASELKELGVWADVVNLHRTEEPDWKNYDSVVIGASIRYGHYHTAFQEFVKKHATRLNAMPSAFYSVNLVARKPEKRTPQTNSYARKFLMSSPWRPDRSAVIAGALLYPRYRWYDRVMIKLIMKMSGGETDTSKEVVYTDWEQVAIFAREIAQLTNKALLK

SEQ ID NO: 498 - protein, 181 aa, Citrobacter sp.
MKTLILFSSRDGQTREIAAYLASELKELGVCTDVVNLHRTEEPDWERYDRVVIGASIRYGHYHSAFLEFVKKHATRLNHMPSAFYSVNLVARKPEKRTPQTNSYARKFLMNSQWRPDRSAVIAGALLYPRYRWYDRMMIQLIMKMSGGETDTRKEVIYTDWEQVASFAREIAQLTPDSVVK

SEQ ID NO: 499 - protein, 181 aa, Shigella sp.
MKTLILFSSRDGQTREIAEYLASELKELGVWADVMNLHRTEEPEWKNYDSVVIGASIRYGHYHSAFQEFVKKHATQLNTMPSAFYSVNLVARKPEKRTPQTNSYARKFLMSSPWRPDHSAVIAGALLYPRYRWYDRVMIQLIMKMSGGETDTKKEVIYTDWEQVAGFAREIAQLTNKTLLK

SEQ ID NO: 500 - protein, 181 aa, Citrobacter sp.
MKTLILFSSRDGQTREIAEYLASELKELGVWADVVNLHRTAEPDWQNYDSVVIGASIRYGHYHAAFQEFVKKHATRLNSMPSAFYSVNLVARKPEKRTPQTNSYARKFLMSSPWRPDHSAVIAGALLYPRYRWYDRVMIQLIMKMSGGETDTNKEVVYTDWEQVARFAREIAQLTNKASLK

SEQ ID NO: 501 - protein, 181 aa, Enterobacter sp.
MKTLILFSSRDGQTREIAEYLASELKELGVWADVVNLHRTAEPDWQNYDSVVIGASIRYGHYHAAFQEFVKKHATRLNSMPSAFYSVNLVARKPEKRTPQTNSYARKFLMSSPWRPDHSAVIAGALLYPRYRWYDRVMIQLIMKMSGGETDTNKEVVYTDWEQVARFAREIAQLTNKTSLK

SEQ ID NO: 502 - protein, 174 aa, Salmonella sp.
MKTLILFSTRDGQTREIASYLASELKEMGIWADVVNLHRAEEPDWDSYDRVVIGASIRYGHYHSAFQEFVKKYATRLNGMPSAFYSVNLVARKAEKRTPQTNSYARKFLMSSPWRPDYCAVIAGALRYPRYRWYDRLMIKLIMKMSGGETDTSKEVVYTDWEQVTHFAREIAHL

SEQ ID NO: 503 - protein, 181 aa, Citrobacter sp.
MKTLILFSSRDGQTREIAEYLASELKELGVWADVVNLHRTAEPDWQNYDSVVIGASIRYGHYHAAFQEFVKKHATRLNSMPSAFYSVNLVARKPEKRTPQTNSYARKFLMGSPWRPDHSAVIAGALLYPRYRWYDRVMIQLIMKMSGGETDTNKEVVYTDWEQVARFAREIAQLTNKTSLK

SEQ ID NO: 504 - protein, 181 aa, Citrobacter sp.
MKTLILFSSRDGQTREIAEYLASELKELGVWADVLNLHRTAEPDWQNYDSVVIGASIRYGHYHAAFQEFVKKHATRLNAMPSAFYSVNLVARKPEKRTPQTNSYARKFLMSSPWRPDRSAVIAGALRYPRYRWYDRVMIQLIMKMSGGETDTHKEVVYTDWEQVAGFAREIAQLTHKTVSK

SEQ ID NO: 505 - protein, 181 aa, Citrobacter sp.
MKTLILFSSRDGQTREIAEYLASELKELGVWADVVNLHRTAEPDWQNYDSVVIGASIRYGHYHAAFQEFVKKHATRLNSMPSAFYSVNLVARKPEKRTPQTNSYARKFLMSSPWRPDHSAVIAGALLYPRYRWYDRVMIQLIMKMSGGETDTNKEVVYTDWEQVARFAREIAQLTNKALLK

SEQ ID NO: 506 - protein, 181 aa, Citrobacter sp.
MKTLILFSSRDGQTREIAEYLASELKELGVWADVVNLHRTAEPDWQNYDSVVIGASIRYGHYHAAFQEFVKKHATRLNAMPSAFYSVNLVARKPEKRTPQTNSYARKFLMSSPWRPDRSAVIAGALLYPRYRWYDRVMIQLIMKMSGGETDTNKEVVYTDWEQVAGFAREIAQLTNKTLSK

SEQ ID NO: 507 - protein, 181 aa, Citrobacter sp.
MKTLILFSSRDGQTREIAEYLASELKELGVWADVVNLHRTAEPDWQNYDSVVVGASIRYGHYHAAFQEFVKKHATRLNAMPSAFYSVNLVARKPEKRTPQTNSYARKFLMSSPWRPDRSAVIAGALLYPRYRWYDRVMIQLIMKMSGGETDTNKEVVYTDWEQVAGFAREIAQLTNKTLSK

SEQ ID NO: 508 - protein, 181 aa, Citrobacter sp.
MKTLILFSSRDGQTREIAEYLASELKELGVWADVVNLHRTAEPDWQNYDSVVIGASIRYGHYHAAFQEFVKKHATRLNAMPSAFYSVNLVARKPEKRTPQTNSYARKFLMSSPWRPDRSAVIAGALLYPRYRWYDRVMIQLIMKMSGGETDTNKEVVYTDWEQVADFAREIAQLTHKTLSK

SEQ ID NO: 509 - protein, 181 aa, Citrobacter sp.
MKTLILFSSRDGQTQEIAAYLASELKELGISTDVVNLHRTDEPDWERYDRVVIGASIRYGHYHSAFLAFVKKHATRLNRMPSAFYSVNLVARKPEKRTPQTNSYARKFLMNSQWRPDRSAVIAGALLYPRYRWYDRMMIQLIMKMSGGETDTRKEVIYTDWAQVASFAREIAQLTPDSLVK

SEQ ID NO: 510 - protein, 181 aa, Citrobacter sp.
MKTLILFSSRDGQTREIAEYLASELKELGVWADVVNLHRTAEPDWQNYDSVVIGASIRYGHYHAAFQEFVKKYATRLNSMPSAFYSVNLVARKPEKRTPQTNSYARKFLMSSPWRPDHSAVIAGALLYPRYRWYDRVMIQLIMKMSGGETDTNKEVVYTDWEQVARFAREIAQLTNKALLK

SEQ ID NO: 511 - protein, 181 aa, Citrobacter sp.
MKTLILFSSRDGQTREIAEYLASELKELGVWADVVNLHRTAEPDWQHYDSVVIGASIRYGHYHAAFQEFVKKHATRLNAMPSAFYSVNLVARKPEKRTPQTNSYARKFLMSSPWRPDRSAVIAGALLYPRYRWYDRVMIQLIMKMSGGETDTNKEVVYTDWEQVADFAREIAQLTHKTLSK

SEQ ID NO: 512 - protein, 181 aa, Citrobacter sp.
MKTLILFSSRDGQTREIAEYLASELKELGVWTDVVNLHRTAEPDWQNYDSVVIGASIRYGHYHAAFQEFVKKHATRLNAMPSAFYSVNLVARKPEKRTPQTNSYARKFLMSSPWRPDRSAVIAGALLYPRYRWYDRVMIQLIMKMSGGETDTHKEVVYTDWEQVAGFAREIAQLTHKTLPK

SEQ ID NO: 513 - protein, 187 aa, Salmonella sp.
MNNGVTRENIDSFSTRDGQTREIASYLASELKEMGIWADVVNLHRAEEPDWDSYDRVVIGASIRYGHYHSAFQEFVKKYATRLNGMPSAFYSVNLVARKAEKRTPQTNSYARKFLMSSPWRPDYCAVIAGALRYPRYRWYDRLMIKLIMKMSGGETDTSKEVVYTDWEQVTHFAREIAHLTNKSSAK

SEQ ID NO: 514 - protein, 181 aa, Citrobacter sp.
MKTLILFSSRDGQTREIAEYLASELKELGVWTDVVNLHRTAEPDWKNYDSVVIGASIRYGHYHSAFQEFVKKYATRLNAMPSAFYSVNLVARKPEKRTPQTNSYARKFLMSSPWRPDRSAVIAGALLYPRYRWYDRVMIQLIMKMSGGETDTNKEVVYTDWEQVAGFAREIAQLTHKTLPK

SEQ ID NO: 515 - protein, 171 aa, Salmonella sp.
DGQTREIASYLASELKEMGIWADVVNLHRAEEPDWDSYDRVVIGASIRYGHYHSAFQEFVKKYATRLNGMPSAFYSVNLVARKAEKRTPQTNSYARKFLMSSPWRPDYCAVIAGALRYPRYRWYDRLMIKLIMKMSGGETDTSKEVVYTDWEQVAHFAREIAHLTNKSSAK

SEQ ID NO: 516 - protein, 181 aa, Enterobacter sp.
MKTLILFSTRDGQTREIAAYLASELKELGIYSDVVNLNRAEQIAWQDYDRVVIGASIRYGHFHPALDRFVKKHTAVLNKLPGAFYSVNLVARKAEKRTPQTNSYTRKFLLNSPWQPDLCAVFAGALRYPRYRWYDRFMIRLIMKMTGGETDTRKEVVYTDWSQVASFAREIAHLTDNSRLK

SEQ ID NO: 517 - protein, 181 aa, Enterobacter sp.
MKTLILFSTRDGQTREIAAYLASELKELGIYSDVVNLNRVEQISWQDYDRVVIGASIRYGHFHPALDRFVKKHTAVLNKLPGAFYSVNLVARKPEKRTPQTNSYTRKFLLSSPWQPELCAVFAGALRYPRYRWYDRFMIRLIMKMTGGETDTRKEVVYTDWSQVASFAREIAHLTDDSRHK

SEQ ID NO: 518 - protein, 181 aa, Enterobacter sp.
MKTLILFSTRDGQTREIAAYLASELKELGIYSDVVNLNRAEQISWQDYDRVVIGASIRYGHFHPALDRFVKKHTAVLNKLPGAFYSVNLVARKPEKRTPQTNSYTRKFLLNSPWQPDLCAVFAGALRYPRYRWYDRFMIRLIMKMTGGETDTRKEVVYTDWSQVASFAREIAHLTGDSRHK

SEQ ID NO: 519 - protein, 181 aa, Enterobacter sp.
MKTLILFSTRDGQTREIAAYLASELKELGIYSDVVNLNRAEQIAWQDYDRVVIGASIRYGHFHPALDRFVKKHAAVLNKMPGAFYSVNLVARKAEKRTPQTNSYTRKFLLSSPWQPDLCAVFAGALRYPRYRWYDRFMIRLIMKMTGGETDTRKEVVYTDWSQVASFAREIAHLTGDSRLK

SEQ ID NO: 520 - protein, 181 aa, Enterobacter sp.
MKTLILFSTRDGQTREIAAYLASELKELGIYSDVVNLNRAEQIAWQDYDRVVIGASIRYGHFHPALDRFVKKHTAVLNKLPGAFYSVNLVARKAEKRTPQTNSYTRKFLLNSPWQPDLCAVFAGALRYPRYRWYDRFMIRLIMKMTGGETDTRKEVVYTDWSQVASFAREIAHLTGNSRLK

SEQ ID NO: 521 - protein, 181 aa, Enterobacter sp.
MKTLILFSTRDGQTREIAAYLASELKELGIYSDVVNLNRADQITWQDYDRVVIGASIRYGHFHPALDRFVKKHTAKLNTLPGAFYSVNLVARKPEKRTPQTNSYTRKFLLNSPWQPELCAVFAGALRYPRYRWYDRFMIRLIMKMTGGETDTRKEVVYTDWSQVASFAREIAHLTGDSRHK

SEQ ID NO: 522 - protein, 181 aa, Enterobacter sp.
MKTLILFSTRDGQTREIASYLASELKELGIYSDVVNLNRTEQITWQDYDRVVIGASIRYGHFHPALDRFVKKHTAVLNKLPGAFYSVNLVARKAEKRTPQTNSYTRKFLLNSPWRPDLCAVFAGALRYPRYRWYDRFMIRLIMKMTGGETDTRKEVVYTDWSQVASFAREIAHLSRDSQRK

SEQ ID NO: 523 - protein, 181 aa, Enterobacter sp.
MKTLILFSTRDGQTREIAAYLASELKELGIYSDVVNLNRAEQITWQEYDRVVIGASIRYGHFHPALDRFVKKHTAVLNKLPGAFYSVNLVARKAEKRTPQTNSYTRKFLLSSPWQPDLCAVFAGALRYPRYRWYDRFMIRLIMKMTGGETDTRKEVVYTDWSQVASFAREIAHLTDDSRLK

SEQ ID NO: 524 - protein, 181 aa, Enterobacter sp.
MKTLILFSTRDGQTREIAAYLASELKELGIYSDVVNLNRAEQIAWQDYDRVVIGASIRYGHFHPALDRFVKKHTAVLNKMPGAFYSVNLVARKAEKRTPQTNSYTRKFLLSSPWQPDLCAVFAGALRYPRYRWYDRFMIRLIMKMTGGETDTRKEVVYTDWSQVASFAREIAHLTGDSRLK

SEQ ID NO: 525 - protein, 181 aa, Enterobacter sp.
MKTLILFSTRDGQTREIAAYLASELKELGIYSDVVNLNRAEQIAWQDYDRVVIGASIRYGHFHPALDRFVKKHTAILNKMPGAFYSVNLVARKAEKRTPQTNSYTRKFLLSSPWQPDLCAVFAGALRYPRYRWYDRFMIRLIMKMTGGETDTRKEVVYTDWSQVASFAREIAHLTGDSRLK

SEQ ID NO: 526 - protein, 180 aa, Enterobacter sp.
MKTLILFSTRDGQTREIAAYLASELKELGIYSDVVNLNRAEQIAWQDYDRVVIGASIRYGHFHPALDRFVKKHTAVLNKMPGAFYSVNLVARKAEKRTPQTNSYTRKFLLSSPWQPDLCAVFAGALRYPRYRWYDRFMIRLIMKMTGGETDTRKEVVTDWSQVATFAREIAHLTGDSRLK

SEQ ID NO: 527 - protein, 181 aa, Enterobacter sp.
MKTLILFSTRDGQTREIASYLASELKELGVYADVVNLNRTEEISWQDYDRVVIGASIRYGHFHPALDSFVKKHTAVLNALPGAFYSVNLVARKAEKRTPQTNSYTRKFLLGSPWQPDLCAVFAGALRYPRYRWYDRFMIRLIMKMTGGETDTRKEVVYTDWAQVASFAREIAQLTADSKVK

SEQ ID NO: 528 - protein, 181 aa, Enterobacter sp.
MKTLILFSTRDGQTREIASYLASELQELGIYSDVVNLNRTEQIAWQDYDRVVIGASIRYGHFHPALDRFVKKHTAALNKLPGAFYSVNLVARKPEKRTPQTNSYTRKFLLNSPWQPDLCAVFAGALRYPRYRWYDRFMIRLIMKMTGGETDTRKEVVYTDWTQVSSFAREIAHLSPESRRI

SEQ ID NO: 529 - protein, 181 aa, Enterobacter sp.
MKTLILFSTRDGQTREIAAYLASELKELGIYSDVVNLNRAEQIAWHDYDRVVIGASIRYGHFHPALDRFVKKHTAVLNKMPGAFYSVNLVARKAEKRTPQTNSYTRKFLLSSPWQPDLCAVFAGALRYPRYRWYDRFMIRLIMKMTGGETDTRKEVVYTDWSQVASFAREIAHLTGDSRLK

SEQ ID NO: 530 - protein, 181 aa, Enterobacter sp.
MKTLILFSTRDGQTREIAAYLASELKELGIYSDVVNLNRAEQIAWQDYDRVVIGASIRYGHFHPALDRFVKKHTAKLNALPGAFYSVNLVARKAEKRTPQTNSYTRKFLLSSPWQPDLCAVFAGALRYPRYRWYDRFMIRLIMKMTGGETDTRKEVVYTDWSQVASFAREIAHLTGDSRHK

SEQ ID NO: 531 - protein, 181 aa, Enterobacter sp.
MKTLILFSTRDGQTREIASYLASELQELGIYSDVVNLNRTEQIAWQDYDRVVIGASIRYGHFHPALDRFVKKHTAALNKLPGAFYSVNLVARKPEKRTPQTNSYTRKFLLNSPWQPDLCAVFAGALRYPRYRWYDRFMIRLIMKMTGGETDTRKEVVYTDWTQVSSFARDIAHLSPESRRI

SEQ ID NO: 532 - protein, 181 aa, Enterobacter sp.
MKTLILFSTRDGQTREIAAYLASELKELGIYSDVVNLNRAEQIAWQEYDRVVIGASIRYGHFHPALDRFVKKHTAVLNKLPGAFYSVNLVARKAEKRTPQTNSYTRKFLLSSPWQPDLCAVFAGALRYPRYRWYDRFMIRLIMKMTGGETDTRKEVVYTDWSQVASFAREIAHLTGDSRLK

SEQ ID NO: 533 - protein, 181 aa, Enterobacter sp.
MKTLILFSTRDGQTREIAAYLASELKELGIYSDVVNLNRAEEIAWQEYDRVVIGASIRYGHFHPALDRFVKKHTAVLNTLPGAFYSVNLVARKAEKRTPQTNSYTRKFLLGSPWQPDLCAVFAGALRYPRYRWYDRFMIRLIMKMTGGETDTRKEVVYTDWSQVASFAREIAHLAGDSRLK

SEQ ID NO: 534 - protein, 181 aa, Enterobacter sp.
MKTLILFSTRDGQTREIAAYLASELKELGIYSDVVNLNRAEQIAWQDYDRVVIGASIRYGHFHPALDRFVKKHTAVLNKMPGAFYSVNLVARKAEKRTPQTNSYTRKFLLSSPWQPDLCAVFAGALRYPRYRWYDRFMIRLIMKMTGGETDTHKEVVYTDWSQVASFAREIAHLTGDSRLK

SEQ ID NO: 535 - protein, 181 aa, Enterobacter sp.
MKTLILFSTRDGQTREIASYLASELKELGIYSDVVNLNRTEQIAWQDYDRVVIGASIRYGHFHPALDRFVKKHTAVLNKLPGAFYSVNLVARKPEKRTPQTNSYTRKFLLSSPWQPDISAVFAGALRYPRYRWYDRFMIRLIMKMTGGETDTRKEVVYTDWSQVASFAREIAHLSGDSRLK

SEQ ID NO: 536 - protein, 181 aa, Enterobacter sp.
MKTLILFSTRDGQTREIAAYLASELKELGIYSDVVNLNRAEQIAWQEYDRVVIGASIRYGHFHPALDRFVKKHTAVLNKLPGAFYSVNLVARKAEKRTPQTNSYTRKFLLGSPWQPDLCAVFAGALRYPRYRWYDRFMIRLIMKMTGGETDTRKEVVYTDWSQVASFAREIAHLTGDSRLK

SEQ ID NO: 537 - protein, 181 aa, Enterobacter sp.
MKTLILFSTRDGQTREIAAYLASELKELGIYSDVVNLNRAEQITWQEYDRVVIGASIRYGHFHPALVRFVKKHTAVLNKLPGAFYSVNLVARKAEKRTPQTNSYTRKFLLSSPWQPALCAVFAGALRYPRYRWYDRFMIRLIMKMTGGETDTRKEVVYTDWSQVASFAREIAHLTDDSRLK

SEQ ID NO: 538 - protein, 181 aa, Enterobacter sp.
MKTLILFSTRDGQTREIAAYLASELKELGIYSDVVNLNRVGQITWQDYDRVVIGASIRYGHFHPALDRFVKKHTAVLNKLPGAFYSVNLVARKAEKRTPQTNSYTRKFLLNSPWQPDLCAVFAGALRYPRYRWYDRFMIRLIMKMTGGETDTRKEVVYTDWSQVASFAREIAHLSGDSRVK

SEQ ID NO: 539 - protein, 299 aa, Escherichia sp. [sequence omitted]

SEQ ID NO: 540 - protein, 299 aa, Escherichia sp.
MKPDAHQVKQFLLNLQDTICQQLTAVDGAEFVEDSWQREAGGGGRSRVLRNGGVFEQAGVNFSHVHGEAMPASATAHRPELAGRSFEAMGASLVVHPHNPYVPTSHANVRFFIAEKPGADPVWWFGGGFDLTPFYGFEEDAIHWHRTARDLCLPFGEDVYPRYKKWCDEYFYLKHRNEQRGIGGLFFDDLNTPDFDRCFAFMQAVGKGYTDAYLPIVERRKAMAYGERERNFQLYRRGRYVEFNLVWDRGTLFGLQTGGRTESILMSMPPLVRWEYDYQPKDGSPEAALSEFIKVRDWV

SEQ ID NO: 541 - protein, 299 aa, Shigella sp.
MKPDAHQVKQFLLNLQDTICQQLTAVDGAEFVEDSWQREAGGGGRSRVLRNGGIFEQAGVNFSHVHGEAMPASATAHRPELAGRSFEAMGVSLVVHPHNPYVPTSHANVRFFIAEKPGAEPVWWFGGGFDLTPFYGFEEDAIHWHRTARDLCLPFGEDVYPRYKKWCDDYFYLKHRNEQRGIGGLFFDDLNTPDFDHCFAFMQAVGKGYTDAYLPIVERRKAMAYGERERNFQLYRRGRYVEFNLVWDRGTLFGLQTGGRTESILMSMPPLVRWEYDYQPKDGSPEAALSEFIKVRDWV

SEQ ID NO: 542 - protein, 299 aa, Citrobacter sp.
MKPDAQRVKQFLLSLQDDICQRLSAVDGAEFIEDSWQREAGGGGRSRVLRNGGIFEQAGVNFSHVHGDAMPASATAHRPELAGRSFEAMGVSLVVHPLNPYIPTSHANVRFFIAEKPGADPVWWFGGGFDLTPYYGIEEDAVHWHRTARDLCQPFGEDVYPRYKKWCDDYFFLKHRNEQRGIGGLFFDDLNTPDFDRCFAFMQAVGKGYTDAYLPIVGRRKTMSWGERERNFQLYRRGRYVEFNLVWDRGTLFGLQTGGRTESILMSMPPLVRWEYDYHPEDGSPEAALSDFIQVRDWV

SEQ ID NO: 543 - protein, 299 aa, Citrobacter sp.
MKPDAQRVKQFLLTLQESICGQLCAVDGAQFVEDSWQREAGGGGRSRVLRNGGVFEQAGVNFSHVHGDAMPASATAHRPELAGRSFEAMGVSLVVHPLNPYIPTSHANVRFFIAEKPGADPVWWFGGGFDLTPYYGFAEDAVHWHRTARDLCLPFGEEVYPRYKKWCDDYFFLKHRNEQRGIGGLFFDDLNTPDFDHCFAFMQAVGKGYTEAYLPIVERRKAMIWGERERNFQLYRRGRYVEFNLVWDRGTLFGLQTGGRTESILMSMPPLVRWEYDWQPEDGSPEAALSEFIKARDWV

SEQ ID NO: 544 - protein, 308 aa, Salmonella sp.
MKPDAHHVKQFLLRLQDDICQTLSAVDGVNFVEDSWRREAGGGGRSRVLRNGGIFEQAGVNFSHVHGDAMPASATAHRPELAGRSFEAMGVSLVVHPHNPYIPTSHANVRFFIAEKPGADPVWWFGGGFDLTPYYGFEEDAVHWHRTARDLCQPFGDDVYPRYKKWCDDYFYLKHRNEQRGVGGLFFDDLNTPDFDHCFAFMQAVGHGYTGAYLPIVERRKAMVWGERERNFQLYRRGRYVEFNLVWDRGTLFGLQTGGRTESILMSMPPLVRWEYGYQPEEGSPEAALCEFIQVRDWVSLPDNSSVS

SEQ ID NO: 545 - protein, 299 aa, Citrobacter sp.
MKPDAQRVKQFLLSLQDNICQQLSAVDGAEFVEDNWQREAGGGGRSRVLRNGGIFEQAGVNFSHVHGEAMPASATAHRPELAGRSFEAMGVSLVVHPQNPYIPTSHANVRFFIAEKPGADPVWWFGGGFDLTPYYGFDEDAVHWHRTARDLCQPFGDDVYPRYKKWCDDYFFLKHRNEQRGIGGLFFDDLNTPDFDHCFAFMQAVGQGYTEAYLPIVERRKAMSWSERERDFQLYRRGRYVEFNLVWDRGTLFGLQTGGRTESILMSMPPLVRWEYDWQPEANSPEAALSEFIQVRDWV

SEQ ID NO: 546 - protein, 299 aa, Rhizobium sp. [sequence omitted]

SEQ ID NO: 547 - protein, 299 aa, Vibrio sp.
MKPDALRVKQFLLNLQDAICQQLTAIDGAEFVEDSWQRDAGGGGRSRVLRNGGIFEQAGVNFSHVHGDAMPASATAHRPELAGRSFEAMGVSLVVHPLNPYIPTSHANVRFFIAEKPDADPVWWFGGGFDLTPYYGFEEDAIHWHRTARDLCQPFGDDVYPRYKKWCDDYFFLKHRNEQRGIGGLFFDDLNTPDFDHCFAFMQAVGEGYTEAYLPIVERRKAMSWGERERNFQLYRRGRYVEFNLVWDRGTLFGLQTGGRTESILMSMPPLVRWEYDWQPDAGSPEAALSDFIQVREWV

SEQ ID NO: 548 - protein, 299 aa, Enterobacter sp.
MKPDAQQVKTFLLALQDSICQQLAAVDGQTFSEDNWQRDGGGGGRSRVLRNGGVFEQAGVNFSHVHGDAMPASATAHRPELAGRSFEAMGVSLVVHPHNPYVPTSHANVRFFIAEKPGADPVWWFGGGFDLTPYYGFEEDAVHWHRTARDLCLPFGEDVYPRYKKWCDDYFYLRHRQEQRGIGGLFFDDLNTPDFDRCFAFMQAVGNGYTDAYLPIVERRKAMAFGERERDFQLYRRGRYVEFNLVWDRGTLFGLQTGGRTESILMSMPPLVRWEYDYQPEDGSPEAALSEFIRVRDWV

SEQ ID NO: 549 - protein, 299 aa, Enterobacter sp.
MTVDANKVKTFLLQLQDDICQQLSALDGGAFIEDSWQRDAGGGGRSRVLRDGGIFEQAGVNFSHVHGDAMPASATAHRPELAGRSFEAMGVSLVVHPRNPYVPTSHANVRFFIAEKPGADPVWWFGGGFDLTPFYGFEEDAIHWHRTARDLCQPFGEDVYPRYKKWCDDYFFIKHRNEQRGIGGLFFDDLNTPDFDSCFAFMQAVGNGFTDAYLPIVKRRKAAIWGERERNFQLYRRGRYVEFNLVWDRGTLFGLQTGGRTESILMSMPPLVRWEYDYQPQAGSPEAALSEFIKVRDWV

SEQ ID NO: 550 - protein, 299 aa, Enterobacter sp.
MKPDVQQVKAFLLQLQDAICAKLSAVDGKDFVEDSWQREGGGSGRSRVLRDGGIFEQAGVNFSHVHGDAMPASATAHRPELAGRSFEAMGVSLVVHPRNPYVPTSHANVRFFIAEKPGADPVWWFGGGFDLTPYYGFEEDAIHWHRTARDLCLPYGDEVYPRYKKWCDDYFFLKHRNEQRGIGGLFFDDLNTPDFDHCFAFMQAVGNGFTDAYLPIVERRKTTPYGERERDFQLYRRGRYVEFNLVWDRGTLFGLQTGGRTESILMSMPPLVRWEYDYHPQEGSPEAALSEFIKVKEWI

SEQ ID NO: 551 - protein, 300 aa, Kluyvera sp.
MTINVQQVKAFLLKLQDDICQQLERVDGGTFIEDSWQREAGGGGRSRVLRDGSVFEQAGVNFSHVHGDAMPASATAHRPELAGRSFEAMGVSLVVHPRNPYVPTSHANVRFFIAEKPGAEPVWWFGGGFDLTPYYGFQEDAVHWHTVARDLCLPFGEDVYPRYKKWCDDYFHLKHRNEQRGIGGLFFDDLNTPDFDHCFGFMQAVGKGFTDAYLPIVERRKAMAYGERERDFQLYRRGRYVEFNLVWDRGTLFGLQTGGRTESILMSMPPLVRWEYNYQPEEGSPEAALSEFIKVKDWLL

SEQ ID NO: 552 - protein, 299 aa, Trabulsiella sp.
MKPDAQQVKTVLLTLQDTLCQQLSATDGSGFTEDLWQRAAGGGGRSRVLRNGGVFEQAGVNFSHVHGDAMPASATAHRPELVGRSFEAMGVSLVIHPHNPYVPTSHANVRFFIAEKPGADPVWWFGGGFDLTPFYGFNEDAVHWHTTARDLCLPFGDEVYPRYKKWCDDYFWLKHRNEQRGIGGLFFDDLNTPDFDHCFAFMQAVGNGFTDAYLPIVERRKMMPFGEREREFQLYRRGRYVEFNLVWDRGTLFGLQTGGRTESILMSMPPLVRWEYNYEPEKGSPEAALSEFLQVRDWI

SEQ ID NO: 553 - protein, 299 aa, Raoultella sp.
MKPDAHQVKRYLLQLQETICQKLSAIDGGEFVEDSWQREGGGGGRSRVLRDGGVFEQAGVNFSHVHGDAMPASATAHRPELAGRSFEAMGVSLVVHPWNPYVPTSHANVRFFIAEKPGAEPVWWFGGGFDLTPFYGFEEDAVHWHRTAHDLCQPFGEEVYPRYKKWCDDYFYLKHRHEQRGIGGLFFDDLNTPDFDHAFAFMQAVGNGYTDAYLPIVEQRKAMPYGERERNFQLYRRGRYVEFNLVWDRGTLFGLQTGGRTESILMSMPPLVRWEYDYQPEEGSPEAALSEFIQVREWI

SEQ ID NO: 554 - protein, 299 aa, Kosakonia sp.
MTPEIAPVKNALLALQDKICRQLSDIDGATFVEDAWQRAEGGGGRSRVLRDGGVFEQAGVNFSHVHGDAMPASATAHRPELAGRSFEAMGVSLVVHPRNPYVPTSHANVRFFIAQKPGADPVWWFGGGFDLTPYYGFEEDAIHWHRTARDICLPFGEEIYPRYKKWCDDYFYLKHRNEQRGIGGLFFDDLNTPDFDHCFAFMQAVGNGYLDAYLPIVARRKALPYGERERDFQLYRRGRYVEFNLVWDRGTLFGLQTGGRTESILMSMPPLVRWEYNYQPAEGSPEAALSEFIQVKDWV

SEQ ID NO: 555 - protein, 299 aa, Enterococcus sp.
MKPDAAQVKTFLLQLQDNLCQQLSAVDGAPFIEDAWQREGGGGGRSRVLREGRVFEQAGVNFSHVHGDAMPASATAHRPELAGRSFEAMGVSLVVHPLNPYVPTSHANVRFFIAEKPGADPVWWFGGGFDLTPYYGFEEDAVHWHRTARDLCLPFGEEVYPRYKKWCDDYFYLKHRQEQRGIGGLFFDDLNTPDFDHCFAFMQAVGNGYADAYLPIVERRKATPYGERERHFQLYRRGRYVEFNLVWDRGTLFGLQTGGRTESILMSMPPLVRWEYDYQPEPGSPEAALSEFIQVRDWL

SEQ ID NO: 556 - protein, 307 aa, unidentified
  source 1..307: note = gamma proteobacterium
  REGION 1..307: note = gamma proteobacterium
MNQLPDINQVKAFLLSLQDQICQKLSAVDGRAQFKQDQWVREEGGGGQSRVLTGGAIFEQAGVNFSHVSGATLPASATAHRPELAGRSFQAMGVSLVIHPLSPYIPTSHANVRFFIAEKPGEAPVWWFGGGFDLTPYYGFEEDARHWHQTAADLCQPFGDDVYPKYKKWCDDYFFIKHRNEARGIGGLFFDDLNSPDFAHCFAFMQAVANGFTDAYLPIVERRKTLTWGEREREFQLYRRGRYVEFNLVWDRGTLFGLQTGGRTESILMSMPPLVRWEYGFEPDENSPEAALYRDFLPVRDWLAESE

SEQ ID NO: 557 - protein, 303 aa, Shewanella sp.
MKPDATQVKAFLLDLQQRICEGLEQLDGEAKFVADSWEREEGGGGTSRVLTKGKVFEQAGVNFSHVTGAAMPASATAHRPELAGRSFEAMGVSLVIHPNNPYVPTTHANVRFFIAEKEGADPVWWFGGGFDLTPYYPFEEDVVAWHQSAKALCEPFGEDVYPKYKKWCDEYFFLPHRNETRGVGGLFFDDLNEPGFENSFAFMQAVGEGFLKAYAPIVEKRKETAYGERERDFQLYRRGRYVEFNLVYDRGTLFGLQTGGRTESILMSMPPLVRWQYAYTPEAGSPEAKLYSDFLKPREWLEA

SEQ ID NO: 558 - protein, 302 aa, Oceanimonas sp.
MSSKPDTSAVKAFLLALQDNICRQLEQADGSGRFIEDSWTREEGGGGRSRVLRNGTVIEQGGVNFSHVYGAAMPASATAHRPELAGRSFEAMGVSLVIHPHNPHVPTSHANVRFFIAEKEGAEPVWWFGGGFDLTPFYPVEEDCRHWHQVSKDLCEPFGEDVYPKYKEWCDRYFYLKHRNETRGVGGLFFDDLNEWPFERCFAFMKAVGEGYLDAYLPIIARRKDTPYGEDERQFQLYRRGRYVEFNLVYDRGTLFGLQTGGRTESILMSMPPLARWEYDWQPEAGSREARLQAFLVPRSWV

SEQ ID NO: 559 - protein, 302 aa, Chromobacterium sp.
MSHPHSDAVKAILLDLQDRICAALEGADGDGRFVEDAWQREAGGGGRSRVLSNGAVFEQAGVNFSHVHGDALPASATAHRPELAGRRFEAMGVSLVIHPHNPHVPTSHANVRFFIAEKAGEAPVWWFGGGFDLTPFYPVREDVVHWHTVARDLCAPFGPEVYPRYKKWCDEYFYLKHRNEARGVGGLFFDDLNEWGFDQSFAFMQAVGNGYLDAYLPIVQARKDTAWGARERQFQLYRRGRYVEFNLVWDRGTLFGLQSGGRTESILMSMPPLVRWEYGYQPEPGSAEALLYTDFLPPRDWV

SEQ ID NO: 560 - protein, 302 aa, Pseudogulbenkiania sp.
MSHPHSDAVKSFLLDLQDRICAALEQADGKAQFAEDAWSREAGGGGRSRVLAGGGVFEQAGVNFSHVHGDALPASATAHRPELADRRFEAMGVSLVIHPSNPHVPTSHANVRFFIAEKDGEAPVWWFGGGFDLTPYYPQEEDAVHWHTVARDLCAPFGGEVYPRYKKWCDEYFHLKHRNEARGIGGLFFDDLNEWGFDKSFAFTRAVGDGYLDAYLPIVARRKEQAWGDRERQFQLYRRGRYVEFNLVWDRGTLFGLQSGGRTESILMSMPPLVRWEYGYQPEPGSPEARLYTDFLPPRDWV

SEQ ID NO: 561 - protein, 302 aa, Chromobacterium sp.
MSHPHSNAVKSFLLDLQDRICAALEQADGKAQFAEDAWSREAGGGGRSRVLTGGEVFEQAGVNFSHVHGDALPPSASAHRPELAGRRFEAMGVSLVIHPSNPHVPTSHANVRFFIAEKDGEAPVWWFGGGFDLTPFYPQEEDAVHWHTVARDLCAPFGGDVYPRYKKWCDEYFHLKHRNEARGIGGLFFDDLNEWGFDKSFAFTRAVGDGYLDAYLPIVARRKEQAWGDRERQFQLYRRGRYVEFNLVWDRGTLFGLQSGGRTESILMSMPPLVRWEYGYQPEPGSPEARLYTDFLPPRDWV

SEQ ID NO: 562 - protein, 302 aa, Aeromonas sp.
MSKPDVAQVKAFLLQLQDEICRGLELADGVGHFVEDAWLREGGGGGRTRVLRHGAVIEQGGVNFSHVHGDAMPASATAHRPELAGRRFEAMGVSLVIHPHNPYVPTSHANVRFFIAEKEGEEPIWWFGGGFDLTPFYPFEEDVRHWHQVSRDLCQPFGTDIYPEFKSWCDRYFFLKHRDETRGVGGLFFDDLNRWPFADCFAFMQVVGKGYLDAYLPIVERRKALAYGEREREFQLYRRGRYVEFNLVYDRGTLFGLQTGGRTESILMSMPPLARWEYDWQPPAGSPEALLYSDYLKPREWL

SEQ ID NO: 563 - protein, 310 aa, Glaciecola sp.
MNTELPSHEKIAQVKAFLLKLQDNICQTLELSDGKARFVEDEWEREQGGGGRTRVLTNGAVIEQGGVNFSHVFGDQMPASATAARPELAGRRFQAMGVSLVIHPHNPYIPTSHANVRFFIAEKEGEAPIWWFGGGFDLTPFFPFKEDVVHWHKVAHDLCLPFGEDVYPKYKKWCDDYFYLKHRNETRGVGGLFFDDLNTPDFETAFGFMQAVGNGYLDAYVPIIEKRKNTEYGNMERDFQLYRRGRYVEFNLVYDRGTLFGLQTGGRTESILMSMPPLVRWEYNYVPDEHSAQGKLAAYLTPQDWLAGQS

SEQ ID NO: 564 - protein, 304 aa, Alteromonas sp.
MDGKNAAEVIEQVKSYLLGLQDTICQTLELADGKGQFVEDSWQREEGGGGRSRVLKNGAVIEQGGVNFSHVFGSQMPASATANRPELAGRNFQAMGVSLVIHPHNPYIPTSHANVRFFIAEKEGEAPIWWFGGGFDLTPFYPFKDDVVHWHDTAKKLCKPFGEDVYPKYKKWCDEYFYLKHRNETRGVGGLFFDDLNEWGFEQSFAFMQAVGNGFIDAYVPIVERRKQTDYGERERDFQLYRRGRYVEFNLVFDRGTLFGLQTGGRTESILMSMPPLARWEYCYTPAPGSAEAKLTDWLKPTPW

SEQ ID NO: 565 - protein, 305 aa, Gilvimarinus sp.
MTTTPDKHAVKAYLMDLQERICDSLAAVDGGRFAEDTWQRAEGGGGRSRVLADGAVIEKGGVNFSHVMGDAMPASATAHRPELAGRSFEAMGVSLVIHPANPYAPTSHANVRFFIAEKEGADPVWWFGGGYDLTPFYGFVEDCVHWHKTAFEACAPFGDDVYPRYKNWCDEYFYLKHRNEARGVGGLFFDDLNELGFDQSFAFMRAVGDSYLQAYRPILERRKDSPYGEREREFQLYRRGRYVEFNLVYDRGTLFGLQTGGRTESILMSLPPLVRWEYDFHPEPDSPEARLSRDFLPHQDWLARQ

SEQ ID NO: 566 - DNA, 453 bp, Acinetobacter sp.
  source 1..453: mol_type = unassigned DNA
atggatgcaccttctgatgctttcttatgggtaaaagcattacatattattgccgtagtatgttggtttgctgccttattctatttacctcgactctatgtttaccatgccatgagtgaggatgacactagtcatcgtcgttttgaagtcatggagcgtaaactttatcgtgggattatgtggccttctatgattgcgacactgatcactgctcattttttggtagattggggcgatgcaacacgacattatcatgaagcactctggttttatatcaaagtcggattggtgggacttttagttatctatcattttgtttgcggctactaccgtaaaaaactgattggcaatgcccattataaatcacacaaattctggcgttattttaatgaaatgccgacactgattttatttgcagtcgtgatcctggtcgtggtcaaaccacaattttaa

SEQ ID NO: 567 - DNA, 1365 bp, Calditerrivibrio sp.
  source 1..1365: mol_type = unassigned DNA
ttatttgtttaagagatttttaaatctatccacattcataaagcttgttctggtgcaatcatttatacccacaccatataagatattaccaccgataaaaatgtcatcaaattttttatagaactcttcaaccttttcaactattttgtggtgcccgatgtagtactgggggattgctttttcccatctaaaatattttattttgtaaggctctctttttatttttaaagtttcttttatgtcatcgaaagccatcctgataagttcatcgtcggatttttcaattatccatctatttttatctccacccattatcgttctaacgattttgtatccatcccttgttctatcagggaatatcgaagaatcaaacagtgctcccaaaattcttttattctctgaatggggtatcagatagccgaagccatccagaggatcttccagatcctccggcttgaatataaacccagcaacaaaaacaggagggtaagtgatgttatttagatccctggatagatctttatcaagaactgagagcatttgggaaacagcataggccggggcatttatgaatattttatcgaactccatgatgcctttattggtatttaatatatatctgtttatttttttatctattgaaaatacttccgtattcaacatctttgtgatgcttgtggattcgagtaaatctgttatcatattatccagtccatttttgtatgaagtaaggattccgccggggcctgatgggccactttttttcccttttttctttatcatccctttaaaaaggccaccataatttatttccagatcccttattacggggaaacaggatcttaagctcatcttttcgggatcacctgcaaaaatgccagagaccattgggctgataaggtattcaagagcttctttccccaatcttcttctggcaaagtctgccacagattcatcttcaaggacacttttttgtatgaaatattcggatagtatcctcatttttgctgagaaggagagtagcttagttttgaaaaacattggtggattttcaggtaatctatgtaaaatcccattgcgcatgatatatctttttcttgctaagtcattacttttgacaagattgttgcttaatcctgccattgatagaagttcaagggtatggggtttgctgtctaaaaaaccatttggccctgcttctactatgaacccatcttcccgtgaggtctctattgaaccgccccacctcaatctcttttctatgattgttatttccatatccagattcagttcatttttcaaattttccaataaaaaagcggtggatatccctgatattccgcctcctattatggctactctcat

SEQ ID NO: 568 - DNA, 1488 bp, Candidatus sp.
  source 1..1488: mol_type = unassigned DNA
atggcgacggaacagcacagcggcagcaggcgtatcgtggtggtggggagcggcatcgcgggtctggctgccgcctatcggctgcaggagcggtgcgagcaggacggcccgccttgcgaggtgcgcgtattggaggccgctgcacggcccggcggtgcgatcagtaccacgcaccgggatggttttgttcttgaatctgggcccgataccattttcaccgataagccgtggggattggatctgatcagacgcctcggtctgagcgagcaggtcatcgggaccaatgaggcgcaccgccggacctttgttgtgcgggacggcgcactgcacccgctgcccgaagggttcgccttgatggggccgaccaagccttggccgtttctgcaatcagggctgctgtcatggcgcggcaaggcaagggcggctctggacctggtactgccgcgagggggaccatccgacgacgagagcctggcgtcgttcgttcggcgtcgtttcggacaggagtttctcgatcggctggcccaaccgatgatcggtggaatctatggcgccgacccggagcggttgagtctgcgcgctaccttcccgcagtttctgcagatggaagcgacgcatcgcagcgtgatcctcggcctgcgacgaatgcgccccgccggccgcggcgtaggtcataccagcagcggcccgcgctatggcctgtttgtcacgctggatcacgggctgcaggccctcgtcgatgccatggtaaaaaggctgccggctgggacgctgcgtctccgcgcgccggttgatagaatcgcgcacacagagcaaggctggaccgttcgacttggagacggcgcgagcctgcaggccgatggccttattctcgccgtccccgcatttgagattgccaggcttacccacgacctggaccaagacctggctcgtcagctcgaggccatgccctacgcctcttcggtcacgatcaatctggcctatcgtagagaggcgatccaccatccgctcgacgggtttggatttgtggtgccggcctgcgaggggcgcaccatcattgcctgttcgttcagcagcgtgaagttcgctcatcgggcgccggccggtcacgtcctgctgcgtgccttcgcgggcggcgcgctgcagccggagccgttcacctgggatgacgagacgctgctgagcgcagtgcgccgcgatctggaggagctgctggcgattcacgcgccgcctttgtggagccagttggtccgacatcctcgtgtgatgccccagtaccaggtcggccacctgggccggttggcggcgctcgaagagacgcttcggcggtggccgaccctcaagctgaccggtaacgcctacagaggtgtcggtgtgccggatgtggttcacagcggggagacggccgccgattcattattggcagagctggccccgtcaccgaccgagccgacccccgcttgtaccgaaggcgattctcgcctataa

SEQ ID NO: 569 - DNA, 1425 bp, Chloroflexus sp.
  source 1..1425: mol_type = unassigned DNA
atgatggcgggatacgacagtgtagtgattggcggtggcattgccggtttagctgcggcttacacgctccacaagcgtggttatcgggtcctggtcatcgagtcgaccaatcgcgttggcggtgtgatccagaccatcaccacaccagaaggctacattctcgattgtgggccgaacacggtgggtaccggcgatgcgcgattgtggcaggaactgatcgatctgggtctgcgcgagcggatcacaccggcagcgccatgtagcaaacggcggttcatcctgatcaatggtacaccggttgaaatcccaacctcaccagtcgggctgattaccacgcgattactctcgtggcgggggaaattgcgggtactggccgaaccgttcatcaaccgtggatcgaccgatcccgatgaaagcgttgctgccttcttcacccgccggattggtgcagaggctaccgcccacctcctcgatccatttgttgccggcgtctacgctggcgatccgcaacggctctcgactgcggcagtctttccatcactgtgggaagcggcccagcgcagtggcagcatcgtgcgcggcatgctgagcaaacccaaaccgaagactcaggtgagtgagccaaagatgcgcagccgcacctttaccttccgcggtggcctggccgaatggccacgcgctctggcgcaagccctgggtgccggcaatgtctggacagaacggcgcgtggtcaagctccaaccacgcgactcctggtgggaagtgacgattgatggtgtgaacggcccggagacactcatcagtcgcagcctcattatcgccaccccagcctttacggcggctgatctcattgagtcggttgatcaaagagcggctggtgccctacgcggcattccgtatgcgccggtagcagtggtacatctcggctttcgtcgtgaccagatcagccaggaattgagcggctttggtgtgctggccccctcaagcgaacagcgtcagttcctcggcattctctggacatcaagcatcttcccgcacgttgcaccacacgatcatgtcctcaccacaaccctcagtggtggtgctatccggcccgaactggccgaacggagtgacgaaacactgattgaagcggccattcgcgatcatcaccagctcctggggatcagagggcaaccgatcttcacccatgttactcgctggcgaaccgccattgcccagtatacctttgggcaccgcgagcggattgccaccctcgtgcaactcgaacagcgcctgccgaccatccagtttgccggcagctaccgcgacggcgttggagtgcccaaaacctgggccagcggtgtgcaggcaggcgagcggatcgctgcggcactggcagcccatggaactaccgcagtttccacagagacggcgtcggggtga

SEQ ID NO: 570 - DNA, 546 bp, Escherichia sp.
  source 1..546: mol_type = unassigned DNA
gtgaaaacattaattcttttctcaacaagggacggacaaacgcgcgagattgcctcctacctggcttcggaactgaaagaactggggatccaggcggatgtcgccaatgtgcaccgcattgaagaaccacagtgggaaaactatgaccgtgtggtcattggtgcttctattcgctatggtcactaccattcagcgttccaggaatttgtcaaaaaacatgcgacgcggctgaattcgatgccgagcgccttttactccgtgaatctggtggcgcgcaaaccggagaagcgtactccacagaccaacagctacgcgcgcaagtttctgatgaactcgcaatggcgtcccgatcgctgcgcggtcattgccggggcgctgcgttacccacgttatcgctggtacgaccgttttatgatcaagctgattatgaagatgtcaggcggtgaaacggatacgcgcaaagaagttgtctataccgattgggagcaggtggcgaatttcgcccgagaaatcgcccatttaaccgacaaaccgacgctgaaataa

SEQ ID NO: 571 - DNA, 900 bp, Escherichia sp.
  source 1..900: mol_type = unassigned DNA
atgaaacccgacgcacaccaggttaaacagtttctgctcaaccttcaggatacgatttgtcagcagctgaccgccgtcgatggcgcagaatttgtcgaagatagttggcagcgcgaagctggcggcggcgggcgtagtcgggtgttgcgtaatggtggtgttttcgaacaggcaggcgtcaacttttcgcatgtccacggtgaggcgatgcctgcttccgccaccgctcatcgcccggaacttgccgggcgcagtttcgaggcgatgggcgtttcactggtagtgcatccgcataacccgtatgttcccaccagccacgcgaatgtgcggttttttattgccgaaaaaccgggtgccgatcccgtctggtggtttggcggtggcttcgacttaaccccattctatggttttgaagaagatgctattcactggcatcgcaccgcccgtgacctgtgcctgccatttggcgaagacgtttatccccgttacaaaaagtggtgcgacgaatacttctacctcaaacatcgcaacgaacagcgcggtattggcgggctgttctttgatgacctgaacacgccagatttcgaccgctgttttgcctttatgcaggcggtaggcaaaggctacaccgacgcttatttaccaattgtcgagcgacggaaagcgatggcctacggcgagcgcgagcgcaatttccagttatatcgtcgcggtcgttatgtcgagttcaatctggtctgggatcgcggcacgctgtttggcctgcaaactggcgggcgcaccgagtctatcctgatgtcaatgccgccactggtacgctgggaatatgattatcagccaaaagatggcagcccagaagcggcgttaagtgagtttattaaggtcagggattgggtgtaa

SEQ ID NO: 572 - DNA, 1326 bp, Hydrogenobacter sp.
  source 1..1326: mol_type = unassigned DNA
atgatagatgtagcggtagtaggggcaggtatatccgggctatccatagcctatcaccttaaaaaggctggacttgaggtaaaggtttttgaaaaagaagatgccgtaggtggaaacatacaaacagcatacatagacggttatgtttgcgagcttggacctcagaccattcttgcggacagtaaagtagaagagtttttaaaagatgcaggtataaagcccatatatgccaatccttcttccaaaaagagatacatatacaggaagggtaagttggtggctcttcctctatcacccgtagaatttctcttatcaccttttctgtccctcggcggaaagctaagagtcctcaaagagccttttgttccaaggtctcccaagcaggaagaaagtatagcggagtttgtcagaaggcgttttgggagggagtttttagattatgtagtagctcctttcgtgtctggagtttacgctggagacccagaggagctatctgttaaatacgcagttagaaaggtttacgagctggagcaaaagtacggaagcgttataaagggagccataaagctcaaagctcttggtccatcgggaaagctcatatcctttgaaggaggaaatgcaactcttataagaaagctctctgaaagtttagaggttcataaagagaatgtggttctgaggataaggagaaaggacgatatttttatcctagataccaaggaggggaaggttacggctaaggcggttgtagtttctactcctgccacatctacaggttatctgctcagggatctgtcttggagcatatccgaggagtttgacaaaatatactacgctcctgttctggtggtgcatgtggcagtaaagtttggtgttctgccagaaggctttggttttttagtgccaaaaaaggaaaacaaaaggatactgggggtgatcttttcatctaatctttttgaaggaaggagtccagagggcaagagtcttatcaccgtatatattggtggtgccacagacccagaaataatagaatacgaagatgaagccattgtaagtgtgctggagagggaactaagagagaccgtagatataagagactgggatcttttaaaaataacgcgctggaaaaagggtataccccaatacactgtggggtacggaaggtatcttgagctggcaaactccatagagatggagcaacccggacttttcttgagtggcaattatctttatggtgtttccgttgcagactgtataagagtttcacatcacatagcaaagagggtaatagactttttggaagttaaggggcgtactgttgtataa

SEQ ID NO: 573 - DNA, 1323 bp, Laribacter sp.
  source 1..1323: mol_type = unassigned DNA
tcagctggccggcgggtagtccagcaagcactggacagccacctgctgccccttgtcgagacagtcgacgaccgataccccgccatgccagttggcacacacgcggataccgtgttcatgcaggtcactgaccgcgctggccagcggcagggcatggctgtcgtactgcggaatggcctgctcctgacgggtcagccggcaaagggtcggctcgccctggatgcggtagagccgccgcagttcttccagcgccagcgccaccagcgtggcgtcatcgtgccggtaacggtcaaggaactgcatgccgccgacaaaggtggtcagcagggtttcgcctgccggcgtgcggtcgggaaacagcgagccggaccagatggagccggcggcaaacggtttttcgactttggggttcagcccgccaaaaccgtcgaggtcatgcccgaccgtgctgcgtggccaggccgtatgcaggacggccaccggggcgtaggttacgttggcaaggttcgctgcaatggccggaaaatggctggccagcagttgcccggccacgtcggccggcacggccagcaccacttcgtcggcgtccagttcacctgctggggttctgacccgccagccggtttccagccgctccagtgcctgcaccgacgtatccagccgtacgtccagcccctgcgccagcgtttcgggcagctgctgcaaaccctcgttcagggtgaaggtggccttgcgccggaaggttttgcggcgggcaaacatgccgcgcacgatggagcctgactggcgctcggcttcgtggatgaccggcagcgtcagtccggccaccagctcttcgggatcaccggcaaaaatgccgccgacaaacggcgaaatggcccgctcgacaaattcgtcgcccagacgacgccggaaaaaggcagccacggtttccggctcacgcaccggccggttgcgccggaaaggctcggtcagcgccagccatttgctccgggcaccgaactgcgatccggtcaggaacgacagcggtccggacggcagggcctcgtagcgatcgccgcgcagcacgaaacggtgccggaccacggccgccgccggccggatggctgccgtgaggcccagccgttccagaaggtccagatgcccggcatggccgtaaagggtattggggccgagttccagccggtaaccgtcggccgctaccgtcccgatcttgccgccgacccggctgccggcctccagcaccacgacggggatgccccgctgttgcaggtgccaggcacacgacaggccggaaatgccggcaccgatcaccaccaccat

SEQ ID NO: 574 - DNA, 1404 bp, Opitutus sp.
  source 1..1404: mol_type = unassigned DNA
ctattgcccggcgcgttccgccagtttttcgccggccgcgatgcaggccgggacggcgatcccgtcgcgggcctgtccccccatgaacagtcccggatggaagcgttcgccggcggcaagagcggcgatgaagtgctcgtgaccgaggttgtactgcgggatggcgcgaggccagaagttgtgccggacaaaaaccgggtcgccgctgacgccgagcaactgcgtgagatcgggccgcacggcggcaagcagctgatcggcgggcaggctggcgagttgcggctggcgtgttccgcccaccatcaccgtcagcgccacgtgtcccagcggcgcgcggcccgggaacagcgaggacgagaacagcacgccaaggaccgagcgcttctcgacggccggcacgagcacgccgaacccgtcgagcggatgcgcgacctgctcgcggcggaagccgaggaagagcgacgagaccggcgggtgttcgatcagcgccagcgcggcgagcggcttttcgccgagcgtgccgatctggagtcgcgcgagggcgggcgcgggcagcgcgaccacgacgctgtcgaagctttgcgtgtgcgtcgccacgtcgtcgtgccaaaccacgttccacttgtcgccgggcacgatggcgtcgagcgaagcgccgagtgtgatggcgccggcggggagacgcgcggcgagcgcctccggcagcacgtgcaggccgtgtttgaaggaaaagatgccggggcgcggctcaccgcgggccttccgggctttggccgcggcgatctggccgcggatcagcgagccgtgggtttgttcgatttcccagagcttggggaacgactgccgcgcggagagcttttcgggatcgccggcatacacgccgcccacgaacggattgagcgcgtagtcgacgaactcgcgcccgaagtgcgactcgacgaattcggcgaggctgacgtcggtcgtgcggacgcgccgccgggcgaacagctcggcgaggagcttgaacttggcgacgggcgaaaacagtgaggaggcgaagaacgacggtggggacatcggcgcggccagcgcgcggccgcggcgaacgatgtagcggtttttcgcggcgggatccgcggcgatgcgttcgccgttcagcccgagttcgtcgatgagcttgtcgacggcgagttcgccggagagcagcgtgttgggtccgccttcgatcagccagccgtcgacttcctccgtcttgatcgagccgccgacgcggtcggattgctcgaacacgcgcaccttgtggccgagctgggtgagccggtgggcggcggtgagcccggtgatgccggcgccaagcacggcgaacgttttgggcggccggcctgaggcggtggcggaaggattaaaaggcgaggtgctcat

SEQ ID NO: 575 - DNA, 1410 bp, Rhodothermus sp.
  source 1..1410: mol_type = unassigned DNA
atggcttctgtgggaatcatcggagccggcattgccggtctgacggccgcctacgaactgcaccgtcgtggcctggaagtgacggtctttgaagccaccgaccgcatcggcggcttcattcagtcggagcggatcgacggctttctggtggagctcggtcctcagacgctccagcgcacctcgggcgacttcgaagagttgctgcgacaggtggatctggaggacgcgtgcattccggcccgaccggtcgcggcgaatcgcttcatcgtgcggggtggccagccgatacccctgccacgctcgccgcgcgaactgctgcgcacgccgctgctttcgccccgggcgcgcctgcgcctgctggccgagccgttcattcaccgggcccaccggagcaccgaggaaagcgtggccaaattcacccggcgtcgactgggtccggaggtgctcgactatctggtagagcccttcgtggccggcatctttgcgggcgatcccgagcagctttcggtgcgctacgccttcccgaaactgttcgaactggagcagcagtacggctcgcttttctggggcctgatccgcgatcggatgaagcagcggtatcatccggccccgcgccgctcgatgttctcgtttgtcgagggcctgcacatgctgccccgggcgctggccgagcggttgcccgcgcacgcgatcgtgcgcaacgcggaggtgctggccatccgctgggacgagaaaaacccctggacgctcacgttccggcagcacggccgcgcttcgacccgttttttcgatatcatcgtctgtgccgtgccgctacaccggctggcgcaactccggattcatcccccggtggatcgccggccgctcagcaccgtcgagcacccgcccattgcgctggtggcgctgggcttccggcgcgagcaggtggcccatccgctggacggcttcgggatgctggtaccggccgtggagcgcgactttcagattctgggcacgctgttctcctcgtcgctctttccggaccgggcgcccgaaggccacgtgctgctgaccacgttcgtcggcggcatgcggcatcccgaactggcgttgctgcccgaagatcggctggaggcgctggtgctgcaggacctgcgccggctgctgggcatctcgggcgcgccggtcttccggcacgtgtggcgctgggagcgctcgatcccgcagtaccggctgggctacgatgcggtgctcgcctgcgttcacgatgtggaaatgagccgctccggtctgtttctggccggcaactacatggaaggcatctccgtgatcgacgcgctccataccggcctgaaggccgcccgcgcgatcatccagcacctgcgcgaagaagcagccggcggtctggccaagctggtgctgggagattga

SEQ ID NO: 576 - skipped

SEQ ID NO: 577 - protein, 534 aa, Amaranthus tuberculatus; identical to SEQ ID NO: 1

SEQ ID NO: 578 - skipped

SEQ ID NO: 579 - protein, 534 aa, Amaranthus tuberculatus; identical to SEQ ID NO: 2

SEQ ID NO: 580 - skipped

SEQ ID NO: 581 - protein, 533 aa, Amaranthus tuberculatus; identical to SEQ ID NO: 3

SEQ ID NO: 582 - skipped

SEQ ID NO: 583 - protein, 533 aa, Amaranthus tuberculatus; identical to SEQ ID NO: 4

SEQ ID NO: 584 - skipped

SEQ ID NO: 585 - protein, 547 aa, Arabidopsis thaliana; identical to SEQ ID NO: 25

SEQ ID NO: 586 - skipped

SEQ ID NO: 587 - protein, 548 aa, Nicotiana tabacum
MTTTPIANHPNIFTHQSSSSPLAFLNRTSFIPFSSISKRNSVNCNGWRTRCSVAKDYTVPSSAVDGGPAAELDCVIVGAGISGLCIAQVMSANYPNLMVTEARDRAGGNITTVERDGYLWEEGPNSFQPSDPMLTMAVDCGLKDDLVLGDPNAPRFVLWKGKLRPVPSKLTDLPFFDLMSIPGKLRAGFGAIGLRPSPPGHEESVEQFVRRNLGGEVFERLIEPFCSGVYAGDPSKLSMKAAFGKVWKLEETGGSIIGGTFKAIKERSSTPKAPRDPRLPKPKGQTVGSFRKGLRMLPDAISARLGSKLKLSWKLSSITKSEKGGYHLTYETPEGVVSLQSRSIVMTVPSYVASNILRPLSVAAADALSNFYYPPVGAVTISYPQEAIRDERLVDGELKGFGQLHPRTQGVETLGTIYSSSLFPNRAPKGRVLLLNYIGGAKNPEILSKTESQLVEVVDRDLRKMLIKPKAQDPLVVGVRVWPQAIPQFLVGHLDTLSTAKAAMNDNGLEGLFLGGNYVSGVALGRCVEGAYEVASEVTGFLSRYAYK

SEQ ID NO: 588 - skipped

SEQ ID NO: 589 - protein, 555 aa, Cichorium sp.
MTSLTDVCSLNCCRSWSSLPPPVSGGSLTSKNPRYLITYSPAHRKCNRWRFRCSIAKDSPITPPISNEFNSQPLLDCVIVGAGISGLCIAQALATKHASVSPDVIVTEARDRVGGNISTVERDGYLWEEGPNSFQPSDAMLTMVVDSGLKDDLVLGDPTAPRFVLWGGDLKPVPSKPADLPFFDLMSFPGKLRAGFGALGFRPSPPDREESVEEFVRRNLGDEVFERLIEPFCSGVYAGDPSKLSMKAAFGKVWNLEQNGGSIVGGAFKAIQDRKNSQKPPRDPRLPKPKGQTVGSFRKGQAMLPNAISTRLGSRVKLCWKLTSISKLENRGYNLTYETPQGFESLQTKTIVMTVPSYVASDLLRPLSLGAADALSKFYYPPVAAVSISYPKDAIRADRLIDGQLKGFGQLHPRSQGVETLGTIYSSSLFPNRAPPGRVLLLNYIGGATNPEILSKTEGEIVDAVDRDLRTMLIRRDAEDPLTLGVRVWPRAIPQFLIGHYDILDSAKAALSSGGFQGMFLGGNYVSGVALGKCVEAAYDVAAEVMNFLSQGVYK

SEQ ID NO: 590 - skipped

SEQ ID NO: 591 - protein, 562 aa, Spinacia sp.
MSAMALSSTMALSLPQSSMSLSHCRHNRITILIPSSSLRRRGGSSIRCSTISTSNSAAAANYQNKNIGTNGVDGGGGGGGVLDCVIVGGGISGLCIAQALSTKYSNLSTNFIVTEAKDRVGGNITTMEADGYLWEEGPNSFQPSDAVLTMAVDSGLKEELVLGDPNSPRFVLWNGKLRPVPSKLTDLPFFDLMSFPGKIRAGLGALGLRPSPPAHEESVEQFVRRNLGDEVFERLIEPFCSGVYAGDPSKLSMKAAFGRVWVLEQKGGSIIGGTLKTIQERKDNPKPPRDPRLPKPKGQTVGSFRKGLSMLPTAISERLGNKVKVSWTLSGIAKSSNGEYNLTYETPDGLVSVRTKSVVMTVPSYVASSLLRPLSDVAAESLSKFHYPPVAAVSLSYPKEAIRSECLIDGELKGFGQLHSRSQGVETLGTIYSSSLFPGRAPPGRTLILNYIGGDTNPGILDKTKDELAEAVDRDLRRILINPNAKAPRVLGVRVWPQAIPQFLIGHFDLLDAAKAALTDGGHKGLFLGGNYVSGVALGRCIEGAYESAAEVVDFLSQYSDK

SEQ ID NO: 592 - skipped

SEQ ID NO: 593 - protein, 531 aa, Spinacia sp.; identical to SEQ ID NO: 7

SEQ ID NO: 594 - skipped

SEQ ID NO: 595 - protein, 557 aa, Solanum tuberosum
MTTTAVANHPSIFTHRSPLPSPSSSSSSPSFLFLNRTNFIPYFSTSKRNSVNCNGWRTRCSVAKDYTVPPSEVDGNQFPELDCVVVGAGISGLCIAKVISANYPNLMVTEARDRAGGNITTVERDGYLWEEGPNSFQPSDPMLTMAVDCGLKDDLVLGDPDAPRFVLWKDKLRPVPGKLTDLPFFDLMSIPGKLRAGFGAIGLRPSPPGYEESVEQFVRRNLGAEVFERLIEPFCSGVYAGDPSKLIMKAAFGKVWKLEQTGGSIIGGTFKAIKERSSNPKPPRDPRLPTPKGQTVGSFRKGLRMLPDAICERLGSKVKLSWKLSSITKSEKGGYLLTYETPEGVVSLRSRSIVMTVPSYVASNILRPLSVAAADALSSFYYPPVAAVTISYPQEAIRDERLVDGELKGFGQLHPRSQGVETLGTIYSSSLFPNRAPNGRVLLLNYIGGATNTEIVSKTESQLVEAVDRDLRKMLIKPKAQDPFVTGVRVWPQAIPQFLVGHLDTLGTAKTALSDNGLDGLFLGGNYVSGVALGRCVEGAYEIASEVTGFLSQYAYK

SEQ ID NO: 596 - skipped

SEQ ID NO: 597 - protein, 535 aa, Zea mays
MVAATATAMATAASPLLNGTRIPARLRHRGLSVRCAAVAGGAAEAPASTGARLSADCVVVGGGISGLCTAQALATRHGVGDVLVTEARARPGGNITTVERPEEGYLWEEGPNSFQPSDPVLTMAVDSGLKDDLVFGDPNAPRFVLWEGKLRPVPSKPADLPFFDLMSIPGKLRAGLGALGIRPPPPGREESVEEFVRRNLGAEVFERLIEPFCSGVYAGDPSKLSMKAAFGKVWRLEETGGSIIGGTIKTIQERSKNPKPPRDARLPKPKGQTVASFRKGLAMLPNAITSSLGSKVKLSWKLTSITKSDDKGYVLEYETPEGVVSVQAKSVIMTIPSYVASNILRPLSSDAADALSRFYYPPVAAVTVSYPKEAIRKECLIDGELQGFGQLHPRSQGVETLGTIYSSSLFPNRAPDGRVLLLNYIGGATNTGIVSKTESELVEAVDRDLRKMLINSTAVDPLVLGVRVWPQAIPQFLVGHLDLLEAAKAALDRGGYDGLFLGGNYVAGVALGRCVEGAYESASQISDFLTKYAYK

SEQ ID NO: 598 - skipped

SEQ ID NO: 599 - protein, 544 aa, Zea mays; identical to SEQ ID NO: 31

SEQ ID NO: 600 - skipped

SEQ ID NO: 601 - protein, 563 aa, Chlamydomonas sp.
MMLTQTPGTATASSRRSQIRSAAHVSAKVAPRPTPFSVASPATAASPATAAARRTLHRTAAAATGAPTASGAGVAKTLDNVYDVIVVGGGLSGLVTGQALAAQHKIQNFLVTEARERVGGNITSMSGDGYVWEEGPNSFQPNDSMLQIAVDSGCEKDLVFGDPTAPRFVWWEGKLRPVPSGLDAFTFDLMSIPGKIRAGLGAIGLINGAMPSFEESVEQFIRRNLGDEVFFRLIEPFCSGVYAGDPSKLSMKAAFNRIWILEKNGGSLVGGAIKLFQERQSNPAPPRDPRLPPKPKGQTVGSFRKGLKMLPDAIERNIPDKIRVNWKLVSLGREADGRYGLVYDTPEGRVKVFARAVALTAPSYVVADLVKEQAPAAAEALGSFDYPPVGAVTLSYPLSAVREERKASDGSVPGFGQLHPRTQGITTLGTIYSSSLFPGRAPEGHMLLLNYIGGTTNRGIVNQTTEQLVEQVDKDLRNMVIKPDAPKPRVVGVRVWPRAIPQFNLGHLEQLDKARKALDAAGLQGVHLGGNYVSGVALGKVVEHGYESAANLAKSVSKAAVKA

SEQ ID NO: 602 - skipped

SEQ ID NO: 603 - protein, 577 aa, Polytomella sp.
MSSSALRLLCGRTSFFNLCQKYPPSFLSQLSTLNFSTHSPFDSTYDVVVVGAGISGLSTAQALSIQHKIDNVLVTEADHRVGGKITTKRNKDFLWEEGPNSCLMNDALYRAARDAGVESKILSADPKLPRWILWGRRLRVAPIGSYALKSDLLSTQGLLRAIRGVTGFGVSPAPPKGQEESVEGFVRRTLGDEIFERLVEPFCSGVYAGDPSKLSMRAAFGKLVEFEETGDGSLLRGVFRYVMNKRRERRTGGAKDGDTVPLNETAKAPKSSSGPTVSSFEGGIEILPKAIAQKLGDRVRLGLRLVRIDPTQLADGTTAYRLSYRRMSHQGDDDSSRTAGAVPRTAEGDVAAGDEDAVVEVVAKKVVLTTPAFDAADILSRSGLVAAANPLKEVDYPPVALVVLSYDVDSISAIHRVSHVAHGLSGFGQLHPRPEGLRTLGTIYGSTLFPNRSPVARTTLLNFVGGSTDRAVGSADPMALAMEVDLDLKKSGLIREGAAKPEVLGVKVYPKAIPQFDIGHLDRVEKAKMMLKNERGGADWSGVKLAGNYVCGVAVGRCIEFGFEIAENLAQELARKK

SEQ ID NO: 604 - skipped

SEQ ID NO: 605 - protein, 544 aa, Sorghum sp.; identical to SEQ ID NO: 28
  source 1..544: note = Sorghum (genus)

SEQ ID NO: 606 - skipped

SEQ ID NO: 607 - protein, 536 aa, Oryza sativa
MAAAAAAMATATSATAAPPLRIRDAARRTRRRGHVRCAVASGAAEAPAAPGARVSADCVVVGGGISGLCTAQALATKHGVGDVLVTEARARPGGNITTAERAGEGYLWEEGPNSFQPSDPVLTMAVDSGLKDDLVFGDPNAPRFVLWEGKLRPVPSKPGDLPFFDLMSIPGKLRAGLGALGVRAPPPGREESVEDFVRRNLGAEVFERLIEPFCSGVYAGDPSKLSMKAAFGKVWRLEDTGGSIIGGTIKTIQERGKNPKPPRDPRLPTPKGQTVASFRKGLTMLPDAITSRLGSKVKLSWKLTSITKSDNKGYALVYETPEGVVSVQAKTVVMTIPSYVASDILRPLSSDAADALSIFYYPPVAAVTVSYPKEAIRKECLIDGELQGFGQLHPRSQGVETLGTIYSSSLFPNRAPAGRVLLLNYIGGSTNTGIVSKTESELVEAVDRDLRKMLINPKAVDPLVLGVRVWPQAIPQFLIGHLDHLEAAKSALGKGGYDGLFLGGNYVAGVALGRCVEGAYESASQISDYLTKYAYK

SEQ ID NO: 608 - skipped

SEQ ID NO: 609 - protein, 505 aa, Amaranthus sp.; identical to SEQ ID NO: 6

SEQ ID NO: 610 - skipped

SEQ ID NO: 611 - protein, 506 aa, Arabidopsis sp.
MELSLLRPTTQSLLPSFSKPNLRLNVYKPLRLRCSVAGGPTVGSSKIEGGGGTTITTDCVIVGGGISGLCIAQALATKHPDAAPNLIVTEAKDRVGGNIITREENGFLWEEGPNSFQPSDPMLTMVVDSGLKDDLVLGDPTAPRFVLWNGKLRPVPSKLTDLPFFDLMSIGGKIRAGFGALGIRPSPPGREESVEEFVRRNLGDEVFERLIEPFCSGVYAGDPSKLSMKAAFGKVWKLEQNGGSIIGGTFKAIQERKNAPKAERDPRLPKPQGQTVGSFRKGLRMLPEAISARLGSKVKLSWKLSGITKLESGGYNLTYETPDGLVSVQSKSVVMTVPSHVASGLLRPLSESAANALSKLYYPPVAAVSISYPKEAIRTECLIDGELKGFGQLHPRTQGVETLGTIYSSSLFPNRAPPGRILLLNYIGGSTNTGILSKSEGELVEAFLVGHFDILDTAKSSLTSSGYEGLFLGGNYVAGVALGRCVEGAYETAIEVNNFMSRYAYK

SEQ ID NO: 612 - skipped

SEQ ID NO: 613 - protein, 504 aa, Nicotiana sp.; identical to SEQ ID NO: 20

SEQ ID NO: 614 - skipped

SEQ ID NO: 615 - protein, 502 aa, Glycine sp.; identical to SEQ ID NO: 11

SEQ ID NO: 616 - skipped

SEQ ID NO: 617 - protein, 401 aa, Cucumis sp.
SFQPSDPILTMVVDSGLKDDLVLGDPDAPRFVLWNGKLRPVPAKPNDLPFFDLMSIGGKIRAGFGALGIRPPPPGREESVEEFVRRNLGNEVFERLIEPFCSGVYAGDPSKLSMKAAFGKVWRLEQNGGSIIGGTFKALQERNKTTKPPRDPRLPKPKGQTVGSFRKGLTMLPNAISTCLGSKVKVSWKLSSISKVDDGGYSLTYETPEGLVSILSRSVIMTVPSYIAGTLLRPISGKAADALSKFYYPPVASVTISYPKGAIRKECLIDGELKGFGQLHPRSQGVTTLGTIYSSSLFPNRAPDGRVLLLNYIGGATNTGILSQTESELIEVVDRDLRKILINPNAEDPLPLSVRVWPQAIPQFLIGHLDVLDTAKAGLREAGMEGLFLGGNYVCGVALGR

SEQ ID NO: 618 - skipped

SEQ ID NO: 619 - protein, 506 aa, Oryza sativa; identical to SEQ ID NO: 37

SEQ ID NO: 620 - skipped

SEQ ID NO: 621 - protein, 574 aa, Oryza sativa
MLSPATTFSSSSSSSSPSRAHARAPTRFAVAASARAARFRPARAMAASDDPRGGRSVAVVGAGVSGLAAAYRLRKRGVQVTVFEAADRAGGKIRTNSEGGFIWDEGANTMTESELEASRLIDDLGLQGKQQYPNSQHKRYIVKDGAPTLIPSDPIALMKSTVLSTKSKLKLFLEPFLYEKSSRRTSGKVSDEHLSESVASFFERHFGKEVVDYLIDPFVAGTSGGDPESLSIRHAFPALWNLENKYGSVIAGAILSKLSTKGDSVKTGGASPGKGRNKRVSFSFHGGMQSLIDALHNEVGDGNVKLGTEVLSLACCCDGVSSSGGWSISVDSKDAKGKDLRKNQSFDAVIMTAPLSNVQRMKFTKGGVPFVLDFLPKVDYLPLSLMVTAFKKEDVKKPLEGFGALIPYKEQQKHGLKTLGHPASCIELNIQINLATLLYFFSGTLFSSMMFPDRAPNDQYLYTSFIGGSHNRDLAGAPTAILKQLVTSDLRKLLGVEGQPTFVKHVHWRNAFPLYGQNYDLVLEAIAKMENNLPGFFYAGNNKDGLAVGNVIASGSKAADLVISYLESCTDQDN

SEQ ID NO: 622 - skipped

SEQ ID NO: 623 - protein, 550 aa, Amaranthus tuberculatus
MSAMALSSSILQCPPHSDISFRFFAHTRTQPPIFFGRPRKLSYIHCSTSSSSTANYQNTITSQGEGDKVLDCVIVGAGISGLCIAQALSTKHIQSNLNFIVTEAKHRVGGNITTMESDGYIWEEGPNSFQPSDPVLTMAVDSGLKDDLVLGDPNAPRFVLWNGKLRPVPSKPTDLPFFDLMSFPGKIRAGLGALGLRPPPPSYEESVEEFVRRNLGDEVFERLIEPFCSGVYAGDPAKLSMKAAFGKVWTLEQKGGSIIAGTLKTIQERKNNPPPPRDPRLPKPKGQTVGSFRKGLIMLPTAIAARLGSKVKLSWTLSNIDKSLNGEYNLTYQTPDGPVSVRTKAVVMTVPSYIASSLLRPLSDVAADSLSKFYYPPVAAVSLSYPKEAIRPECLIDGELKGFGQLHPRSQGVETLGTIYSSSLFPGRAPPGRTLILSYIGGATNLGILQKSEDELAETVDKDLRKILINPNAKGSRVLGVRVWPKAIPQFLVGHFDVLDAAKAGLANAGQKGLFLGGNYVSGVALGRCIEGAYDSASEVVDFLSQYKDK

SEQ ID NO: 624 - skipped

SEQ ID NO: 625 - protein, 547 aa, Alopecurus myosuroides
MLTSATTPSSSSASSRASTRFASSSRPRRTAYARGRRLRPVLAMAASDDPRARSVAVVGAGISGLVAAYRLSKSGVRVTVFEADDRAGGKIRTNSDSGFLWDEGANTMTESALEASRLIDDLGLEDRLQYPNSQHKRYTVKDGAPALIPSDPIALMKSSLLSTKSKFKLFLEPFLYDKSSTKSSKKVSDEHISESVGSFFERHFGKEVVDYLIDPFVAGTSAGDPESLSIRHAFPGLWNLEKKYGSIIVGAIMSKLTAKGDKKGSAVSGKGRNKRASFSFHGGMQTLVDALHKEVGDGNVKLGAQVLSLACICDGLSASDGWSISVDSKDASNKELTKNHSFDAVIMTAPLSNVQRMKFTKGGAPFVLDFLPKVDYLPLSLMVTAFKKEDVKRPLEGFGVLIPYKEQQKHGLKTLGTLFSSMMFPDRAPNDQHLFTTFVGGSHNRDLAGAPTSILKQLVTSDLGKLLGVEGQPTFVKHIHWRNAFPLYGHDYDSALEAIGKMESDLPGFFYAGNNKDGLAVGNVIASGSKTADLVISYLESGIKQDN

SEQ ID NO: 626 - skipped

SEQ ID NO: 627 - protein, 531 aa, Alopecurus myosuroides
MVGATMAIATVTAALPLRVRVPGRSRRGQARCAVASDATEAPAAPSARLSADCVIVGGGISGLCTAQALATKYGVSDLLVTEARARPGGNITTVERPDEGYLWEEGPNSFQPSDPVLTMAVDSGLKDELVFGDPNAPRFVLWEGKLRPVPSKPGDLPFFDLMSIPGKLRAGLGALGIRPPPPGREESVEEFVRRNLGAEVFERLIEPFCSGVYAGDPSKLSMRAAFGKVWRLEENGGSIIGGTIKAIQDKGKNPKPPRDPRLPAPKGQTVASFRKGLAMLPNAIASRLGSKVKLSWKLTSITKSENQGYVLGYETPEGVVSVQAKSVIMTIPSYIASDILRPLSSDAADGLSKFYYPPVAAVTVSYPKEAIRKECLIDGELQGFGQLHPRSQGVETLGTIYSSSLFPNRAPAGRVLLLNYIGGATNTGIVSKTESDLVEAVDRDLRKMLINPRAADPLALGVRVWPQAIPQFLIGHLDRLDAAKSALVRSGCSGLFLGGNYVAGVALGRCIEGAYDSASEVSDFLNKYAYK

SEQ ID NO: 628 - protein, 551 aa, Oryza sativa
MLSPATTFSSSSSSSSPSRAHARAPTRFAVAASARAARFRPARAMAASDDPRGGRSVAVVGAGVSGLAAAYRLRKRGVQVTVFEAADRAGGKIRTNSEGGFIWDEGANTMTESELEASRLIDDLGLQGKQQYPNSQHKRYIVKDGAPTLIPSDPIALMKSTVLSTKSKLKLFLEPFLYEKSSRRTSGKVSDEHLSESVASFFERHFGKEVVDYLIDPFVAGTSGGDPESLSIRHAFPALWNLENKYGSVIAGAILSKLSTKGDSVKTGGASPGKGRNKRVSFSFHGGMQSLIDALHNEVGDGNVKLGTEVLSLACCCDGVSSSGGWSISVDSKDAKGKDLRKNQSFDAVIMTAPLSNVQRMKFTKGGVPFVLDFLPKVDYLPLSLMVTAFKKEDVKKPLEGFGALIPYKEQQKHGLKTLGTLFSSMMFPDRAPNDQYLYTSIIGGSHNRDLAGAPTAILKQLVTSDLRKLLGVEGQPTFVKHVHWRNAFPLYGQNYDLVLEAIAKMENNLPGFFYAGNNKDGLAVGNVIASGSKAADLVISYLESCTDQDN

SEQ ID NO: 629 - protein, 551 aa, Oryza sativa
MLSPATTFSSSSSSSSPSRAHARAPTRFAVAASARAARFRPARAMAASDDPRGGRSVAVVGAGVSGLAAAYRLRKRGVQVTVFEAADRAGGKIRTNSEGGFIWDEGANTMTESELEASRLIDDLGLQGKQQYPNSQHKRYIVKDGAPTLIPSDPIALMKSTVLSTKSKLKLFLEPFLYEKSSRRTSGKVSDEHLSESVASFFERHFGKEVVDYLIDPFVAGTSGGDPESLSIRHAFPALWNLENKYGSVIAGAILSKLSTKGDSVKTGGASPGKGRNKRVSFSFHGGMQSLIDALHNEVGDGNVKLGTEVLSLACCCDGVSSSGGWSISVDSKDAKGKDLRKNQSFDAVIMTAPLSNVQRMKFTKGGVPFVLDFLPKVDYLPLSLMVTAFKKEDVKKPLEGFGALIPYKEQQKHGLKTLGTLFSSMMFPDRAPNDQYLYTSLIGGSHNRDLAGAPTAILKQLVTSDLRKLLGVEGQPTFVKHVHWRNAFPLYGQNYDLVLEAIAKMENNLPGFFYAGNNKDGLAVGNVIASGSKAADLVISYLESCTDQDN

SEQ ID NO: 630 - protein, 551 aa, Oryza sativa
MLSPATTFSSSSSSSSPSRAHARAPTRFAVAASARAARFRPARAMAASDDPRGGRSVAVVGAGVSGLAAAYRLRKRGVQVTVFEAADRAGGKIRTNSEGGFIWDEGANTMTESELEASRLIDDLGLQGKQQYPNSQHKRYIVKDGAPTLIPSDPIALMKSTVLSTKSKLKLFLEPFLYEKSSRRTSGKVSDEHLSESVASFFERHFGKEVVDYLIDPFVAGTSGGDPESLSIRHAFPALWNLENKYGSVIAGAILSKLSTKGDSVKTGGASPGKGRNKRVSFSFHGGMQSLIDALHNEVGDGNVKLGTEVLSLACCCDGVSSSGGWSISVDSKDAKGKDLRKNQSFDAVIMTAPLSNVQRMKFTKGGVPFVLDFLPKVDYLPLSLMVTAFKKEDVKKPLEGFGALIPYKEQQKHGLKTLGTLFSSMMFPDRAPNDQYLYTSVIGGSHNRDLAGAPTAILKQLVTSDLRKLLGVEGQPTFVKHVHWRNAFPLYGQNYDLVLEAIAKMENNLPGFFYAGNNKDGLAVGNVIASGSKAADLVISYLESCTDQDN

SEQ ID NO: 631 - protein, 551 aa, Oryza sativa
MLSPATTFSSSSSSSSPSRAHARAPTRFAVAASARAARFRPARAMAASDDPRGGRSVAVVGAGVSGLAAAYRLRKRGVQVTVFEAADRAGGKIRTNSEGGFIWDEGANTMTESELEASRLIDDLGLQGKQQYPNSQHKRYIVKDGAPTLIPSDPIALMKSTVLSTKSKLKLFLEPFLYEKSSRRTSGKVSDEHLSESVASFFERHFGKEVVDYLIDPFVAGTSGRDPESLSIRHAFPALWNLENKYGSVIAGAILSKLSTKGDSVKTGGASPGKGRNKRVSFSFHGGMQSLIDALHNEVGDGNVKLGTEVLSLACCCDGVSSSGGWSISVDSKDAKGKDLRKNQSFDAVIMTAPLSNVQRMKFTKGGVPFVLDFLPKVDYLPLSLMVTAFKKEDVKKPLEGFGALIPYKEQQKHGLKTLGTLFSSMMFPDRAPNDQYLYTSFIGGSHNRDLAGAPTAILKQLVTSDLRKLLGVEGQPTFVKHVHWRNAFPLYGQNYDLVLEAIAKMENNLPGFFYAGNNKDGLAVGNVIASGSKAADLVISYLESCTDQDN

SEQ ID NO: 632 - protein, 551 aa, Oryza sativa
MLSPATTFSSSSSSSSPSRAHARAPTRFAVAASARAARFRPARAMAASDDPRGGRSVAVVGAGVSGLAAAYRLRKRGVQVTVFEAADRAGGKIRTNSEGGFIWDEGANTMTESELEASRLIDDLGLQGKQQYPNSQHKRYIVKDGAPTLIPSDPIALMKSTVLSTKSKLKLFLEPFLYEKSSRRTSGKVSDEHLSESVASFFERHFGKEVVDYLIDPFVAGTSGGDPESLSIRHAFPALWNLENKYGSVIAGAILSKLSTKGDSVKTGGASPGKGRNKRVSFSFHGGMQSLIDALHNEVGDGNVKLGTEVLSLACCCDGVSSSGGWSISVDSKDAKGKDLRKNQSFDAVIMTAPLSNVQRMKFTKGGVPFVLDFLPKVDYLPLSLMVTAFKKEDVKKPLEGFGALIPYKEQQKHGLKTLATLFSSMMFPDRAPNDQYLYTSFIGGSHNRDLAGAPTAILKQLVTSDLRKLLGVEGQPTFVKHVHWRNAFPLYGQNYDLVLEAIAKMENNLPGFFYAGNNKDGLAVGNVIASGSKAADLVISYLESCTDQDN

SEQ ID NO: 633 - protein, 551 aa, Oryza sativa
MLSPATTFSSSSSSSSPSRAHARAPTRFAVAASARAARFRPARAMAASDDPRGGRSVAVVGAGVSGLAAAYRLRKRGVQVTVFEAADRAGGKIRTNSEGGFIWDEGANTMTESELEASRLIDDLGLQGKQQYPNSQHKRYIVKDGAPTLIPSDPIALMKSTVLSTKSKLKLFLEPFLYEKSSRRTSGKVSDEHLSESVASFFERHFGKEVVDYLIDPFVAGTSGGDPESLSIRHAFPALWNLENKYGSVIAGAILSKLSTKGDSVKTGGASPGKGRNKRVSFSFHGGMQSLIDALHNEVGDGNVKLGTEVLSLACCCDGVSSSGGWSISVDSKDAKGKDLRKNQSFDAVIMTAPLSNVQRMKFTKGGVPFVLDFLPKVDYLPLSLMVTAFKKEDVKKPLEGFGALIPYKEQQKHGLKTFGTLFSSMMFPDRAPNDQYLYTSFIGGSHNRDLAGAPTAILKQLVTSDLRKLLGVEGQPTFVKHVHWRNAFPLYGQNYDLVLEAIAKMENNLPGFFYAGNNKDGLAVGNVIASGSKAADLVISYLESCTDQDN

SEQ ID NO: 634 - protein, 551 aa, Oryza sativa
MLSPATTFSSSSSSSSPSRAHARAPTRFAVAASARAARFRPARAMAASDDPRGGRSVAVVGAGVSGLAAAYRLRKRGVQVTVFEAADRAGGKIRTNSEGGFIWDEGANTMTESELEASRLIDDLGLQGKQQYPNSQHKRYIVKDGAPTLIPSDPIALMKSTVLSTKSKLKLFLEPFLYEKSSRRTSGKVSDEHLSESVASFFERHFGKEVVDYLIDPFVAGTSGGDPESLSIRHAFPALWNLENKYGSVIAGAILSKLSTKGDSVKTGGASPGKGRNKRVSFSFHGGMQSLIDALHNEVGDGNVKLGTEVLSLACCCDGVSSSGGWSISVDSKDAKGKDLRKNQSFDAVIMTAPLSNVQRMKFTKGGVPFVLDFLPKVDYLPLSLMVTAFKKEDVKKPLEGFGALIPYKEQQKHGLKTLGTFFSSMMFPDRAPNDQYLYTSFIGGSHNRDLAGAPTAILKQLVTSDLRKLLGVEGQPTFVKHVHWRNAFPLYGQNYDLVLEAIAKMENNLPGFFYAGNNKDGLAVGNVIASGSKAADLVISYLESCTDQDN

SEQ ID NO: 635 - protein, 551 aa, Oryza sativa
MLSPATTFSSSSSSSSPSRAHARAPTRFAVAASARAARFRPARAMAASDDPRGGRSVAVVGAGVSGLAAAYRLRKRGVQVTVFEAADRAGGKIRTNSEGGFIWDEGANTMTESELEASRLIDDLGLQGKQQYPNSQHKGYIVKDGAPTLIPSDPIALMKSTVLSTKSKLKLFLEPFLYEKSSRRTSGKVSDEHLSESVASFFERHFGKEVVDYLIDPFVAGTSGGDPESLSIRHAFPALWNLENKYGSVIAGAILSKLSTKGDSVKTGGASPGKGRNKRVSFSFHGGMQSLIDALHNEVGDGNVKLGTEVLSLACCCDGVSSSGGWSISVDSKDAKGKDLRKNQSFDAVIMTAPLSNVQRMKFTKGGVPFVLDFLPKVDYLPLSLMVTAFKKEDVKKPLEGFGALIPYKEQQKHGLKTLGTLFSSMMFPDRAPNDQYLYTSFIGGSHNRDLAGAPTAILKQLVTSDLRKLLGVEGQPTFVKHVHWRNAFPLYGQNYDLVLEAIAKMENNLPGFFYAGNNKDGLAVGNVIASGSKAADLVISYLESCTDQDN

SEQ ID NO: 636 - protein, 551 aa, Oryza sativa
MLSPATTFSSSSSSSSPSRAHARAPTRFAVAASARAARFRPARAMAASDDPRGGRSVAVVGAGVSGLAAAYRLRKRGVQVTVFEAADRAGGKIRTNSEGGFIWDEGANTMTESELEASRLIDDLGLQGKQQYPNSQHKLYIVKDGAPTLIPSDPIALMKSTVLSTKSKLKLFLEPFLYEKSSRRTSGKVSDEHLSESVASFFERHFGKEVVDYLIDPFVAGTSGGDPESLSIRHAFPALWNLENKYGSVIAGAILSKLSTKGDSVKTGGASPGKGRNKRVSFSFHGGMQSLIDALHNEVGDGNVKLGTEVLSLACCCDGVSSSGGWSISVDSKDAKGKDLRKNQSFDAVIMTAPLSNVQRMKFTKGGVPFVLDFLPKVDYLPLSLMVTAFKKEDVKKPLEGFGALIPYKEQQKHGLKTLGTLFSSMMFPDRAPNDQYLYTSFIGGSHNRDLAGAPTAILKQLVTSDLRKLLGVEGQPTFVKHVHWRNAFPLYGQNYDLVLEAIAKMENNLPGFFYAGNNKDGLAVGNVIASGSKAADLVISYLESCTDQDN

SEQ ID NO: 637 - protein, 551 aa, Oryza sativa
MLSPATTFSSSSSSSSPSRAHARAPTRFAVAASARAARFRPARAMAASDDPRGGRSVAVVGAGVSGLAAAYRLRKRGVQVTVFEAADRAGGKIRTNSEGGFIWDEGANTMTESELEASRLIDDLGLQGKQQYPNSQHKRYIVKDGAPTLIPSDPIALMKSTVLSTKSKLKLFLEPFLYEKSSRRTSGKVSDEHLSESVASFFERHFGKEVVDYLIDPFVAGTSGGDPESLSIRHAFPALWNLENKYGSVIAGAILSKLSTKGDSVKTGGASPGKGRNKRVSFSFHGGMQSLIDALHNEVGDGNVKLGTEVLSLACCCDGVSSSGGWSISVDSKDAKGKDLRKNQSFDAVIMTAPLSNVQRMKFTKGGVPFVLDFLPKVDYLPLSLMVTAFKKEDVKKPLEGFGALIPYKEQQKHGLKTLGTLFSSMMFPDRAPNDQYLYTSFIGGSHNRDLAGAPTAILKQLVTSDLRKLLGVEGQPTFVKHVHWRNAFPLYGQNYDLVLEAIAKMENNLPGFFYAGNNKDGLAVGNVIASGSKAADLVISYLESCTDQDN

SEQ ID NO: 638 - DNA, 1656 bp, Oryza sativa
  source 1..1656: mol_type = unassigned DNA
atgctctctcctgccaccaccttctcctcctcctcctcctcctcgtcgccgtcgcgcgcccacgctcgcgctcccacccgcttcgcggtcgcagcatccgcgcgcgccgcacggttccgccccgcgcgcgccatggccgcctccgacgacccccgcggcgggaggtccgtcgccgtcgtcggcgccggcgtcagtgggctcgcggcggcgtacaggctgaggaagcgcggcgtgcaggtgacggtgttcgaggcggccgacagggcgggtgggaagatacggaccaactccgagggcgggttcatctgggacgaaggggccaacaccatgacagagagtgaattggaggcaagcaggcttattgacgatcttggcctacaaggcaaacagcagtatcctaactcacaacacaagcgttacattgtcaaagatggagcaccaacactgattccctcagatcccattgcgctcatgaaaagcactgttctttctacaaaatcaaagctcaagctatttctggaaccatttctctatgagaaatctagcagaaggacctcgggaaaagtgtctgatgaacatttaagtgagagtgttgcaagtttctttgaacgccactttggaaaagaggttgttgattatcttattgatccatttgtggctggaacaagcggaggagatcctgagtcattatcaattcgtcatgcatttccagcattatggaatttggagaataagtatggctctgtcattgctggtgccatcttgtccaaactatccactaagggtgattcagtgaagacaggaggtgcttcgccagggaaaggaaggaataaacgtgtgtcattttcatttcatggtggaatgcagtcactaatagatgcacttcacaatgaagttggagatggtaacgtgaagcttggtacagaagtgttgtcattggcatgttgctgtgatggagtctcttcttctggtggttggtcaatttctgttgattcaaaagatgctaaagggaaagatctcagaaagaaccaatctttcgatgctgttataatgactgctccattgtctaatgtccagaggatgaagtttacaaaaggtggagttccctttgtgctagactttcttcctaaggtcgattatctaccactatctctcatggtaacagcttttaagaaggaagatgtcaaaaaaccattggaaggatttggtgccttgataccctataaggaacagcaaaagcatggtctcaaaacccttgggaccctcttctcctcgatgatgtttccagatcgagctcctaatgatcaatatctatatacatctttgattggggggagccataatagagacctcgctggggctccaacggctattctgaaacaacttgtgacctctgacctaagaaagctcttgggtgttgagggacaacctacttttgtgaagcatgtacattggagaaatgcttttcctttatatggccagaattatgatctggtactggaagctatagcaaaaatggagaacaatcttccagggttcttttacgcaggaaataacaaggatgggttggctgttggaaatgttatagcttcaggaagcaaggctgctgaccttgtgatctcttatcttgaatcttgcacagatcaggacaattag

SEQ ID NO: 639 - DNA, 1656 bp, Oryza sativa
  source 1..1656: mol_type = unassigned DNA
atgctctctcctgccaccaccttctcctcctcctcctcctcctcgtcgccgtcgcgcgcccacgctcgcgctcccacccgcttcgcggtcgcagcatccgcgcgcgccgcacggttccgccccgcgcgcgccatggccgcctccgacgacccccgcggcgggaggtccgtcgccgtcgtcggcgccggcgtcagtgggctcgcggcggcgtacaggctgaggaagcgcggcgtgcaggtgacggtgttcgaggcggccgacagggcgggtgggaagatacggaccaactccgagggcgggttcatctgggacgaaggggccaacaccatgacagagagtgaattggaggcaagcaggcttattgacgatcttggcctacaaggcaaacagcagtatcctaactcacaacacaagcgttacattgtcaaagatggagcaccaacactgattccctcagatcccattgcgctcatgaaaagcactgttctttctacaaaatcaaagctcaagctatttctggaaccatttctctatgagaaatctagcagaaggacctcgggaaaagtgtctgatgaacatttaagtgagagtgttgcaagtttctttgaacgccactttggaaaagaggttgttgattatcttattgatccatttgtggctggaacaagcggaggagatcctgagtcattatcaattcgtcatgcatttccagcattatggaatttggagaataagtatggctctgtcattgctggtgccatcttgtccaaactatccactaagggtgattcagtgaagacaggaggtgcttcgccagggaaaggaaggaataaacgtgtgtcattttcatttcatggtggaatgcagtcactaatagatgcacttcacaatgaagttggagatggtaacgtgaagcttggtacagaagtgttgtcattggcatgttgctgtgatggagtctcttcttctggtggttggtcaatttctgttgattcaaaagatgctaaagggaaagatctcagaaagaaccaatctttcgatgctgttataatgactgctccattgtctaatgtccagaggatgaagtttacaaaaggtggagttccctttgtgctagactttcttcctaaggtcgattatctaccactatctctcatggtaacagcttttaagaaggaagatgtcaaaaaaccattggaaggatttggtgccttgataccctataaggaacagcaaaagcatggtctcaaaacccttgggaccctcttctcctcgatgatgtttccagatcgagctcctaatgatcaatatctatatacatctttaattggggggagccataatagagacctcgctggggctccaacggctattctgaaacaacttgtgacctctgacctaagaaagctcttgggtgttgagggacaacctacttttgtgaagcatgtacattggagaaatgcttttcctttatatggccagaattatgatctggtactggaagctatagcaaaaatggagaacaatcttccagggttcttttacgcaggaaataacaaggatgggttggctgttggaaatgttatagcttcaggaagcaaggctgctgaccttgtgatctcttatcttgaatcttgcacagatcaggacaattag

SEQ ID NO: 640 - DNA, 1656 bp, Oryza sativa
  source 1..1656: mol_type = unassigned DNA
atgctctctcctgccaccaccttctcctcctcctcctcctcctcgtcgccgtcgcgcgcccacgctcgcgctcccacccgcttcgcggtcgcagcatccgcgcgcgccgcacggttccgccccgcgcgcgccatggccgcctccgacgacccccgcggcgggaggtccgtcgccgtcgtcggcgccggcgtcagtgggctcgcggcggcgtacaggctgaggaagcgcggcgtgcaggtgacggtgttcgaggcggccgacagggcgggtgggaagatacggaccaactccgagggcgggttcatctgggacgaaggggccaacaccatgacagagagtgaattggaggcaagcaggcttattgacgatcttggcctacaaggcaaacagcagtatcctaactcacaacacaagcgttacattgtcaaagatggagcaccaacactgattccctcagatcccattgcgctcatgaaaagcactgttctttctacaaaatcaaagctcaagctatttctggaaccatttctctatgagaaatctagcagaaggacctcgggaaaagtgtctgatgaacatttaagtgagagtgttgcaagtttctttgaacgccactttggaaaagaggttgttgattatcttattgatccatttgtggctggaacaagcggaggagatcctgagtcattatcaattcgtcatgcatttccagcattatggaatttggagaataagtatggctctgtcattgctggtgccatcttgtccaaactatccactaagggtgattcagtgaagacaggaggtgcttcgccagggaaaggaaggaataaacgtgtgtcattttcatttcatggtggaatgcagtcactaatagatgcacttcacaatgaagttggagatggtaacgtgaagcttggtacagaagtgttgtcattggcatgttgctgtgatggagtctcttcttctggtggttggtcaatttctgttgattcaaaagatgctaaagggaaagatctcagaaagaaccaatctttcgatgctgttataatgactgctccattgtctaatgtccagaggatgaagtttacaaaaggtggagttccctttgtgctagactttcttcctaaggtcgattatctaccactatctctcatggtaacagcttttaagaaggaagatgtcaaaaaaccattggaaggatttggtgccttgataccctataaggaacagcaaaagcatggtctcaaaacccttgggaccctcttctcctcgatgatgtttccagatcgagctcctaatgatcaatatctatatacatctctcattggggggagccataatagagacctcgctggggctccaacggctattctgaaacaacttgtgacctctgacctaagaaagctcttgggtgttgagggacaacctacttttgtgaagcatgtacattggagaaatgcttttcctttatatggccagaattatgatctggtactggaagctatagcaaaaatggagaacaatcttccagggttcttttacgcaggaaataacaaggatgggttggctgttggaaatgttatagcttcaggaagcaaggctgctgaccttgtgatctcttatcttgaatcttgcacagatcaggacaattag

SEQ ID NO: 641 - DNA, 1656 bp, Oryza sativa
  source 1..1656: mol_type = unassigned DNA
atgctctctcctgccaccaccttctcctcctcctcctcctcctcgtcgccgtcgcgcgcccacgctcgcgctcccacccgcttcgcggtcgcagcatccgcgcgcgccgcacggttccgccccgcgcgcgccatggccgcctccgacgacccccgcggcgggaggtccgtcgccgtcgtcggcgccggcgtcagtgggctcgcggcggcgtacaggctgaggaagcgcggcgtgcaggtgacggtgttcgaggcggccgacagggcgggtgggaagatacggaccaactccgagggcgggttcatctgggacgaaggggccaacaccatgacagagagtgaattggaggcaagcaggcttattgacgatcttggcctacaaggcaaacagcagtatcctaactcacaacacaagcgttacattgtcaaagatggagcaccaacactgattccctcagatcccattgcgctcatgaaaagcactgttctttctacaaaatcaaagctcaagctatttctggaaccatttctctatgagaaatctagcagaaggacctcgggaaaagtgtctgatgaacatttaagtgagagtgttgcaagtttctttgaacgccactttggaaaagaggttgttgattatcttattgatccatttgtggctggaacaagcggaggagatcctgagtcattatcaattcgtcatgcatttccagcattatggaatttggagaataagtatggctctgtcattgctggtgccatcttgtccaaactatccactaagggtgattcagtgaagacaggaggtgcttcgccagggaaaggaaggaataaacgtgtgtcattttcatttcatggtggaatgcagtcactaatagatgcacttcacaatgaagttggagatggtaacgtgaagcttggtacagaagtgttgtcattggcatgttgctgtgatggagtctcttcttctggtggttggtcaatttctgttgattcaaaagatgctaaagggaaagatctcagaaagaaccaatctttcgatgctgttataatgactgctccattgtctaatgtccagaggatgaagtttacaaaaggtggagttccctttgtgctagactttcttcctaaggtcgattatctaccactatctctcatggtaacagcttttaagaaggaagatgtcaaaaaaccattggaaggatttggtgccttgataccctataaggaacagcaaaagcatggtctcaaaacccttgggaccctcttctcctcgatgatgtttccagatcgagctcctaatgatcaatatctatatacatctgtcattggggggagccataatagagacctcgctggggctccaacggctattctgaaacaacttgtgacctctgacctaagaaagctcttgggtgttgagggacaacctacttttgtgaagcatgtacattggagaaatgcttttcctttatatggccagaattatgatctggtactggaagctatagcaaaaatggagaacaatcttccagggttcttttacgcaggaaataacaaggatgggttggctgttggaaatgttatagcttcaggaagcaaggctgctgaccttgtgatctcttatcttgaatcttgcacagatcaggacaattag

SEQ ID NO: 642 - DNA, 1656 bp, Oryza sativa
  source 1..1656: mol_type = unassigned DNA
atgctctctcctgccaccaccttctcctcctcctcctcctcctcgtcgccgtcgcgcgcccacgctcgcgctcccacccgcttcgcggtcgcagcatccgcgcgcgccgcacggttccgccccgcgcgcgccatggccgcctccgacgacccccgcggcgggaggtccgtcgccgtcgtcggcgccggcgtcagtgggctcgcggcggcgtacaggctgaggaagcgcggcgtgcaggtgacggtgttcgaggcggccgacagggcgggtgggaagatacggaccaactccgagggcgggttcatctgggacgaaggggccaacaccatgacagagagtgaattggaggcaagcaggcttattgacgatcttggcctacaaggcaaacagcagtatcctaactcacaacacaagcgttacattgtcaaagatggagcaccaacactgattccctcagatcccattgcgctcatgaaaagcactgttctttctacaaaatcaaagctcaagctatttctggaaccatttctctatgagaaatctagcagaaggacctcgggaaaagtgtctgatgaacatttaagtgagagtgttgcaagtttctttgaacgccactttggaaaagaggttgttgattatcttattgatccatttgtggctggaacaagcggaggagatcctgagtcattatcaattcgtcatgcatttccagcattatggaatttggagaataagtatggctctgtcattgctggtgccatcttgtccaaactatccactaagggtgattcagtgaagacaggaggtgcttcgccagggaaaggaaggaataaacgtgtgtcattttcatttcatggtggaatgcagtcactaatagatgcacttcacaatgaagttggagatggtaacgtgaagcttggtacagaagtgttgtcattggcatgttgctgtgatggagtctcttcttctggtggttggtcaatttctgttgattcaaaagatgctaaagggaaagatctcagaaagaaccaatctttcgatgctgttataatgactgctccattgtctaatgtccagaggatgaagtttacaaaaggtggagttccctttgtgctagactttcttcctaaggtcgattatctaccactatctctcatggtaacagcttttaagaaggaagatgtcaaaaaaccattggaaggatttggtgccttgataccctataaggaacagcaaaagcatggtctcaaaacccttgggaccctcttctcctcgatgatgtttccagatcgagctcctaatgatcaatatctatatacatctatcattggggggagccataatagagacctcgctggggctccaacggctattctgaaacaacttgtgacctctgacctaagaaagctcttgggtgttgagggacaacctacttttgtgaagcatgtacattggagaaatgcttttcctttatatggccagaattatgatctggtactggaagctatagcaaaaatggagaacaatcttccagggttcttttacgcaggaaataacaaggatgggttggctgttggaaatgttatagcttcaggaagcaaggctgctgaccttgtgatctcttatcttgaatcttgcacagatcaggacaattag

SEQ ID NO: 643 - DNA, 1656 bp, Oryza sativa
  source 1..1656: mol_type = unassigned DNA
atgctctctcctgccaccaccttctcctcctcctcctcctcctcgtcgccgtcgcgcgcccacgctcgcgctcccacccgcttcgcggtcgcagcatccgcgcgcgccgcacggttccgccccgcgcgcgccatggccgcctccgacgacccccgcggcgggaggtccgtcgccgtcgtcggcgccggcgtcagtgggctcgcggcggcgtacaggctgaggaagcgcggcgtgcaggtgacggtgttcgaggcggccgacagggcgggtgggaagatacggaccaactccgagggcgggttcatctgggacgaaggggccaacaccatgacagagagtgaattggaggcaagcaggcttattgacgatcttggcctacaaggcaaacagcagtatcctaactcacaacacaagcgttacattgtcaaagatggagcaccaacactgattccctcagatcccattgcgctcatgaaaagcactgttctttctacaaaatcaaagctcaagctatttctggaaccatttctctatgagaaatctagcagaaggacctcgggaaaagtgtctgatgaacatttaagtgagagtgttgcaagtttctttgaacgccactttggaaaagaggttgttgattatcttattgatccatttgtggctggaacaagcggaggagatcctgagtcattatcaattcgtcatgcatttccagcattatggaatttggagaataagtatggctctgtcattgctggtgccatcttgtccaaactatccactaagggtgattcagtgaagacaggaggtgcttcgccagggaaaggaaggaataaacgtgtgtcattttcatttcatggtggaatgcagtcactaatagatgcacttcacaatgaagttggagatggtaacgtgaagcttggtacagaagtgttgtcattggcatgttgctgtgatggagtctcttcttctggtggttggtcaatttctgttgattcaaaagatgctaaagggaaagatctcagaaagaaccaatctttcgatgctgttataatgactgctccattgtctaatgtccagaggatgaagtttacaaaaggtggagttccctttgtgctagactttcttcctaaggtcgattatctaccactatctctcatggtaacagcttttaagaaggaagatgtcaaaaaaccattggaaggatttggtgccttgataccctataaggaacagcaaaagcatggtctcaaaacccttgggaccttcttctcctcgatgatgtttccagatcgagctcctaatgatcaatatctatatacatctttcattggggggagccataatagagacctcgctggggctccaacggctattctgaaacaacttgtgacctctgacctaagaaagctcttgggtgttgagggacaacctacttttgtgaagcatgtacattggagaaatgcttttcctttatatggccagaattatgatctggtactggaagctatagcaaaaatggagaacaatcttccagggttcttttacgcaggaaataacaaggatgggttggctgttggaaatgttatagcttcaggaagcaaggctgctgaccttgtgatctcttatcttgaatcttgcacagatcaggacaattag

SEQ ID NO: 644 - DNA, 1656 bp, Oryza sativa
  source 1..1656: mol_type = unassigned DNA
atgctctctcctgccaccaccttctcctcctcctcctcctcctcgtcgccgtcgcgcgcccacgctcgcgctcccacccgcttcgcggtcgcagcatccgcgcgcgccgcacggttccgccccgcgcgcgccatggccgcctccgacgacccccgcggcgggaggtccgtcgccgtcgtcggcgccggcgtcagtgggctcgcggcggcgtacaggctgaggaagcgcggcgtgcaggtgacggtgttcgaggcggccgacagggcgggtgggaagatacggaccaactccgagggcgggttcatctgggacgaaggggccaacaccatgacagagagtgaattggaggcaagcaggcttattgacgatcttggcctacaaggcaaacagcagtatcctaactcacaacacaagcgttacattgtcaaagatggagcaccaacactgattccctcagatcccattgcgctcatgaaaagcactgttctttctacaaaatcaaagctcaagctatttctggaaccatttctctatgagaaatctagcagaaggacctcgggaaaagtgtctgatgaacatttaagtgagagtgttgcaagtttctttgaacgccactttggaaaagaggttgttgattatcttattgatccatttgtggctggaacaagcggaggagatcctgagtcattatcaattcgtcatgcatttccagcattatggaatttggagaataagtatggctctgtcattgctggtgccatcttgtccaaactatccactaagggtgattcagtgaagacaggaggtgcttcgccagggaaaggaaggaataaacgtgtgtcattttcatttcatggtggaatgcagtcactaatagatgcacttcacaatgaagttggagatggtaacgtgaagcttggtacagaagtgttgtcattggcatgttgctgtgatggagtctcttcttctggtggttggtcaatttctgttgattcaaaagatgctaaagggaaagatctcagaaagaaccaatctttcgatgctgttataatgactgctccattgtctaatgtccagaggatgaagtttacaaaaggtggagttccctttgtgctagactttcttcctaaggtcgattatctaccactatctctcatggtaacagcttttaagaaggaagatgtcaaaaaaccattggaaggatttggtgccttgataccctataaggaacagcaaaagcatggtctcaaaacccttgcgaccctcttctcctcgatgatgtttccagatcgagctcctaatgatcaatatctatatacatctttcattggggggagccataatagagacctcgctggggctccaacggctattctgaaacaacttgtgacctctgacctaagaaagctcttgggtgttgagggacaacctacttttgtgaagcatgtacattggagaaatgcttttcctttatatggccagaattatgatctggtactggaagctatagcaaaaatggagaacaatcttccagggttcttttacgcaggaaataacaaggatgggttggctgttggaaatgttatagcttcaggaagcaaggctgctgaccttgtgatctcttatcttgaatcttgcacagatcaggacaattag

SEQ ID NO: 645 - DNA, 1656 bp, Oryza sativa
  source 1..1656: mol_type = unassigned DNA
atgctctctcctgccaccaccttctcctcctcctcctcctcctcgtcgccgtcgcgcgcccacgctcgcgctcccacccgcttcgcggtcgcagcatccgcgcgcgccgcacggttccgccccgcgcgcgccatggccgcctccgacgacccccgcggcgggaggtccgtcgccgtcgtcggcgccggcgtcagtgggctcgcggcggcgtacaggctgaggaagcgcggcgtgcaggtgacggtgttcgaggcggccgacagggcgggtgggaagatacggaccaactccgagggcgggttcatctgggacgaaggggccaacaccatgacagagagtgaattggaggcaagcaggcttattgacgatcttggcctacaaggcaaacagcagtatcctaactcacaacacaagcgttacattgtcaaagatggagcaccaacactgattccctcagatcccattgcgctcatgaaaagcactgttctttctacaaaatcaaagctcaagctatttctggaaccatttctctatgagaaatctagcagaaggacctcgggaaaagtgtctgatgaacatttaagtgagagtgttgcaagtttctttgaacgccactttggaaaagaggttgttgattatcttattgatccatttgtggctggaacaagcggaggagatcctgagtcattatcaattcgtcatgcatttccagcattatggaatttggagaataagtatggctctgtcattgctggtgccatcttgtccaaactatccactaagggtgattcagtgaagacaggaggtgcttcgccagggaaaggaaggaataaacgtgtgtcattttcatttcatggtggaatgcagtcactaatagatgcacttcacaatgaagttggagatggtaacgtgaagcttggtacagaagtgttgtcattggcatgttgctgtgatggagtctcttcttctggtggttggtcaatttctgttgattcaaaagatgctaaagggaaagatctcagaaagaaccaatctttcgatgctgttataatgactgctccattgtctaatgtccagaggatgaagtttacaaaaggtggagttccctttgtgctagactttcttcctaaggtcgattatctaccactatctctcatggtaacagcttttaagaaggaagatgtcaaaaaaccattggaaggatttggtgccttgataccctataaggaacagcaaaagcatggtctcaaaacctttgggaccctcttctcctcgatgatgtttccagatcgagctcctaatgatcaatatctatatacatctttcattggggggagccataatagagacctcgctggggctccaacggctattctgaaacaacttgtgacctctgacctaagaaagctcttgggtgttgagggacaacctacttttgtgaagcatgtacattggagaaatgcttttcctttatatggccagaattatgatctggtactggaagctatagcaaaaatggagaacaatcttccagggttcttttacgcaggaaataacaaggatgggttggctgttggaaatgttatagcttcaggaagcaaggctgctgaccttgtgatctcttatcttgaatcttgcacagatcaggacaattag

SEQ ID NO: 646 - DNA, 1656 bp, Oryza sativa
  source 1..1656: mol_type = unassigned DNA
atgctctctcctgccaccaccttctcctcctcctcctcctcctcgtcgccgtcgcgcgcccacgctcgcgctcccacccgcttcgcggtcgcagcatccgcgcgcgccgcacggttccgccccgcgcgcgccatggccgcctccgacgacccccgcggcgggaggtccgtcgccgtcgtcggcgccggcgtcagtgggctcgcggcggcgtacaggctgaggaagcgcggcgtgcaggtgacggtgttcgaggcggccgacagggcgggtgggaagatacggaccaactccgagggcgggttcatctgggacgaaggggccaacaccatgacagagagtgaattggaggcaagcaggcttattgacgatcttggcctacaaggcaaacagcagtatcctaactcacaacacaagcgttacattgtcaaagatggagcaccaacactgattccctcagatcccattgcgctcatgaaaagcactgttctttctacaaaatcaaagctcaagctatttctggaaccatttctctatgagaaatctagcagaaggacctcgggaaaagtgtctgatgaacatttaagtgagagtgttgcaagtttctttgaacgccactttggaaaagaggttgttgattatcttattgatccatttgtggctggaacaagcggaagagatcctgagtcattatcaattcgtcatgcatttccagcattatggaatttggagaataagtatggctctgtcattgctggtgccatcttgtccaaactatccactaagggtgattcagtgaagacaggaggtgcttcgccagggaaaggaaggaataaacgtgtgtcattttcatttcatggtggaatgcagtcactaatagatgcacttcacaatgaagttggagatggtaacgtgaagcttggtacagaagtgttgtcattggcatgttgctgtgatggagtctcttcttctggtggttggtcaatttctgttgattcaaaagatgctaaagggaaagatctcagaaagaaccaatctttcgatgctgttataatgactgctccattgtctaatgtccagaggatgaagtttacaaaaggtggagttccctttgtgctagactttcttcctaaggtcgattatctaccactatctctcatggtaacagcttttaagaaggaagatgtcaaaaaaccattggaaggatttggtgccttgataccctataaggaacagcaaaagcatggtctcaaaacccttgggaccctcttctcctcgatgatgtttccagatcgagctcctaatgatcaatatctatatacatctttcattggggggagccataatagagacctcgctggggctccaacggctattctgaaacaacttgtgacctctgacctaagaaagctcttgggtgttgagggacaacctacttttgtgaagcatgtacattggagaaatgcttttcctttatatggccagaattatgatctggtactggaagctatagcaaaaatggagaacaatcttccagggttcttttacgcaggaaataacaaggatgggttggctgttggaaatgttatagcttcaggaagcaaggctgctgaccttgtgatctcttatcttgaatcttgcacagatcaggacaattag

SEQ ID NO: 647 - DNA, 1656 bp, Oryza sativa; identical to SEQ ID NO: 646
  source 1..1656: mol_type = unassigned DNA

SEQ ID NO: 648 - DNA, 1656 bp, Oryza sativa
  source 1..1656: mol_type = unassigned DNA
atgctctctcctgccaccaccttctcctcctcctcctcctcctcgtcgccgtcgcgcgcccacgctcgcgctcccacccgcttcgcggtcgcagcatccgcgcgcgccgcacggttccgccccgcgcgcgccatggccgcctccgacgacccccgcggcgggaggtccgtcgccgtcgtcggcgccggcgtcagtgggctcgcggcggcgtacaggctgaggaagcgcggcgtgcaggtgacggtgttcgaggcggccgacagggcgggtgggaagatacggaccaactccgagggcgggttcatctgggacgaaggggccaacaccatgacagagagtgaattggaggcaagcaggcttattgacgatcttggcctacaaggcaaacagcagtatcctaactcacaacacaagctttacattgtcaaagatggagcaccaacactgattccctcagatcccattgcgctcatgaaaagcactgttctttctacaaaatcaaagctcaagctatttctggaaccatttctctatgagaaatctagcagaaggacctcgggaaaagtgtctgatgaacatttaagtgagagtgttgcaagtttctttgaacgccactttggaaaagaggttgttgattatcttattgatccatttgtggctggaacaagcggaggagatcctgagtcattatcaattcgtcatgcatttccagcattatggaatttggagaataagtatggctctgtcattgctggtgccatcttgtccaaactatccactaagggtgattcagtgaagacaggaggtgcttcgccagggaaaggaaggaataaacgtgtgtcattttcatttcatggtggaatgcagtcactaatagatgcacttcacaatgaagttggagatggtaacgtgaagcttggtacagaagtgttgtcattggcatgttgctgtgatggagtctcttcttctggtggttggtcaatttctgttgattcaaaagatgctaaagggaaagatctcagaaagaaccaatctttcgatgctgttataatgactgctccattgtctaatgtccagaggatgaagtttacaaaaggtggagttccctttgtgctagactttcttcctaaggtcgattatctaccactatctctcatggtaacagcttttaagaaggaagatgtcaaaaaaccattggaaggatttggtgccttgataccctataaggaacagcaaaagcatggtctcaaaacccttgggaccctcttctcctcgatgatgtttccagatcgagctcctaatgatcaatatctatatacatctttcattggggggagccataatagagacctcgctggggctccaacggctattctgaaacaacttgtgacctctgacctaagaaagctcttgggtgttgagggacaacctacttttgtgaagcatgtacattggagaaatgcttttcctttatatggccagaattatgatctggtactggaagctatagcaaaaatggagaacaatcttccagggttcttttacgcaggaaataacaaggatgggttggctgttggaaatgttatagcttcaggaagcaaggctgctgaccttgtgatctcttatcttgaatcttgcacagatcaggacaattag

SEQ ID NO: 649 - DNA, 1656 bp, Oryza sativa
  source 1..1656: mol_type = unassigned DNA
atgctctctcctgccaccaccttctcctcctcctcctcctcctcgtcgccgtcgcgcgcccacgctcgcgctcccacccgcttcgcggtcgcagcatccgcgcgcgccgcacggttccgccccgcgcgcgccatggccgcctccgacgacccccgcggcgggaggtccgtcgccgtcgtcggcgccggcgtcagtgggctcgcggcggcgtacaggctgaggaagcgcggcgtgcaggtgacggtgttcgaggcggccgacagggcgggtgggaagatacggaccaactccgagggcgggttcatctgggacgaaggggccaacaccatgacagagagtgaattggaggcaagcaggcttattgacgatcttggcctacaaggcaaacagcagtatcctaactcacaacacaagggttacattgtcaaagatggagcaccaacactgattccctcagatcccattgcgctcatgaaaagcactgttctttctacaaaatcaaagctcaagctatttctggaaccatttctctatgagaaatctagcagaaggacctcgggaaaagtgtctgatgaacatttaagtgagagtgttgcaagtttctttgaacgccactttggaaaagaggttgttgattatcttattgatccatttgtggctggaacaagcggaggagatcctgagtcattatcaattcgtcatgcatttccagcattatggaatttggagaataagtatggctctgtcattgctggtgccatcttgtccaaactatccactaagggtgattcagtgaagacaggaggtgcttcgccagggaaaggaaggaataaacgtgtgtcattttcatttcatggtggaatgcagtcactaatagatgcacttcacaatgaagttggagatggtaacgtgaagcttggtacagaagtgttgtcattggcatgttgctgtgatggagtctcttcttctggtggttggtcaatttctgttgattcaaaagatgctaaagggaaagatctcagaaagaaccaatctttcgatgctgttataatgactgctccattgtctaatgtccagaggatgaagtttacaaaaggtggagttccctttgtgctagactttcttcctaaggtcgattatctaccactatctctcatggtaacagcttttaagaaggaagatgtcaaaaaaccattggaaggatttggtgccttgataccctataaggaacagcaaaagcatggtctcaaaacccttgggaccctcttctcctcgatgatgtttccagatcgagctcctaatgatcaatatctatatacatctttcattggggggagccataatagagacctcgctggggctccaacggctattctgaaacaacttgtgacctctgacctaagaaagctcttgggtgttgagggacaacctacttttgtgaagcatgtacattggagaaatgcttttcctttatatggccagaattatgatctggtactggaagctatagcaaaaatggagaacaatcttccagggttcttttacgcaggaaataacaaggatgggttggctgttggaaatgttatagcttcaggaagcaaggctgctgaccttgtgatctcttatcttgaatcttgcacagatcaggacaattag

SEQ ID NO: 650 - DNA, 1656 bp, Oryza sativa
  source 1..1656: mol_type = unassigned DNA
atgctctctcctgccaccaccttctcctcctcctcctcctcctcgtcgccgtcgcgcgcccacgctcgcgctcccacccgcttcgcggtcgcagcatccgcgcgcgccgcacggttccgccccgcgcgcgccatggccgcctccgacgacccccgcggcgggaggtccgtcgccgtcgtcggcgccggcgtcagtgggctcgcggcggcgtacaggctgaggaagcgcggcgtgcaggtgacggtgttcgaggcggccgacagggcgggtgggaagatacggaccaactccgagggcgggttcatctgggacgaaggggccaacaccatgacagagagtgaattggaggcaagcaggcttattgacgatcttggcctacaaggcaaacagcagtatcctaactcacaacacaagcgttacattgtcaaagatggagcaccaacactgattccctcagatcccattgcgctcatgaaaagcactgttctttctacaaaatcaaagctcaagctatttctggaaccatttctctatgagaaatctagcagaaggacctcgggaaaagtgtctgatgaacatttaagtgagagtgttgcaagtttctttgaacgccactttggaaaagaggttgttgattatcttattgatccatttgtggctggaacaagcggaggagatcctgagtcattatcaattcgtcatgcatttccagcattatggaatttggagaataagtatggctctgtcattgctggtgccatcttgtccaaactatccactaagggtgattcagtgaagacaggaggtgcttcgccagggaaaggaaggaataaacgtgtgtcattttcatttcatggtggaatgcagtcactaatagatgcacttcacaatgaagttggagatggtaacgtgaagcttggtacagaagtgttgtcattggcatgttgctgtgatggagtctcttcttctggtggttggtcaatttctgttgattcaaaagatgctaaagggaaagatctcagaaagaaccaatctttcgatgctgttataatgactgctccattgtctaatgtccagaggatgaagtttacaaaaggtggagttccctttgtgctagactttcttcctaaggtcgattatctaccactatctctcatggtaacagcttttaagaaggaagatgtcaaaaaaccattggaaggatttggtgccttgataccctataaggaacagcaaaagcatggtctcaaaacccttgggaccctcttctcctcgatgatgtttccagatcgagctcctaatgatcaatatctatatacatctttcattggggggagccataatagagacctcgctggggctccaacggctattctgaaacaacttgtgacctctgacctaagaaagctcttgggtgttgagggacaacctacttttgtgaagcatgtacattggagaaatgcttttcctttatatggccagaattatgatctggtactggaagctatagcaaaaatggagaacaatcttccagggttcttttacgcaggaaataacaaggatgggttggctgttggaaatgttatagcttcaggaagcaaggctgctgaccttgtgatctcttatcttgaatcttgcacagatcaggacaattag

SEQ ID NO: 651 - protein, 179 aa, Enterobacter cloacae [sequence omitted]

SEQ ID NO: 652 - protein, 178 aa, Pantoea ananatis
MKALILFSTRDGQTQKIASAIADEIKGQQSCDVINIQDAKTLDWQQYDRVLIGASIRYGHFQPVVNEFVKHNLLALQQRVSGFFSVNLTARKPEKRSPETNAYTVKFLAQSPWQPDCCAVFAGALYYPRYRWFDRVMIQFIMRMTGGETDASKEVEYTDWQQVQRFARDFAQLPGKSY

SEQ ID NO: 653 - protein, 177 aa, Pantoea stewardii
MKALILYSTRDGQTRKIASSIADVIRQQQQCDVLNIKDASLPDWAQYDRVLIGASIRYGHFQPVVDKFVKQHLHELQQRTSGFFSVNLTARKPEKRSPETNAYTQKFLAHSPWQPDCCAVFAGALYYPRYRWFDRVMIQLIMRMTGGETDSTKEVEYTDWQQVSTFANDFAQLPGKS

SEQ ID NO: 654 - protein, 181 aa, Escherichia coli; identical to SEQ ID NO: 448

SEQ ID NO: 655 - protein, 178 aa, Erwinia toletana
MKALILFSSREGQTREIASYIANSIKEEMECDVFNILRVEQIDWSQYDRVLIGGSIHYGHFHPAVAKFVKRHLHELQQRSSGFFCVNLTARKADKRTPQTNAYMRKFLLQSPWQPDCCAVFAGALRYTRYRWFDRVMIQLIMRMTGGETDTSKEVEYTDWTQVARFAQEFAHLPGKTQ

SEQ ID NO: 656 - protein, 179 aa, Pectobacterium carotovorum
MKALIVFSSRDGQTRAIASYIANTLKGTLECDVVNVLNANDIDLSQYDRVAIGASIRYGRFHPAVNQFIRKHLTSLQQLPSAFFSVNLTARKPEKRTIQTNAYTRKFLLNSPWQPDLCCVFAGALRYPRYRWFDRVMIQLIMRITGGETDSTKEIEYTDWQQVARFAQDFAQLAAKNPA

SEQ ID NO: 657 - protein, 179 aa, Shimwellia blattae
MKTLILFSTRDGQTHKIARHIAGVLEEQGKACELVDLLQPGEPDWSTVECVVLGASIRYGHFHKSFIRFVNTHAQRLNNMPGALFTVNLVARKPEKQSPQTNSYTRKFLAASPWQPQRCQVFAGALRYPRYSWYDRMMIRLIMKMAGGETDTRKEVEYTDWQSVTRFAREIAQLPGETR

SEQ ID NO: 658 - protein, 178 aa, Pantoea stewardii
MKALILFSSRDGQTQLIASSIAKELEGKQACDVLNILDTTNVEWTQYDRVLIGASIRYGHFHPAVAEFVKRHQRELQQRSSGFFSVNLTARKPEKRSPETNAYTAKFLNQSPWQPDCCAVFAGALRYPRYRWFDRIMIQLIMRMTGGETDSSKEVEYTDWQQVTRFAQEFARLPGKTS

SEQ ID NO: 659 - protein, 180 aa, Enterobacter cloacae
MKTLILFSTRDGQTREIAAFLASELKEQGIYADVINLNRTEEIAWQEYDRVVIGASIRYGHFHPAVDRFVKKHTETLNSLPGAFFSVNLVARKAEKRTPQTNSYTRKFLLNSPWKPAACAVFAGALRYPRYRWYDRFMIRLIMKMTGGETDTRKEVVYTDWSQVASFAREIVQLTRSSRL

SEQ ID NO: 660 - protein, 177 aa, Enterobacter mori
MKILILFSTRDGQTREIAASLASELKEQAFDVDVVNLHRAENIAWEEYDGVVIGASIRYGHFHSTLNSFVKKHQQALKKLPGAFYSVNLVARKPEKRTPQTNSYTRKFLLDSPWQPDLSAVFAGALRYPRYNWYDRIMIRLIMKITGGETDTRKEVVYTDWQQVTHFAHEIVQLVRK

SEQ ID NO: 661 - protein, 178 aa, Enterobacter cloacae
KALVLYSTRDGQTHAIASYIASCMKEKAECDVIDLTHGEHVNLTQYDQVLIGASIRYGHFNAVLDKFIKRNVDQLNNMPSAFFCVNLTARKPEKRTPQTNPYVRKFLLATPWQPALCGVFAGALRYPRYRWIDKVMIQLIMRMTGGETDTSKEVEYTDWEQVKKFAEDFAKLSYKKAL

SEQ ID NO: 662 - protein, 177 aa, Pantoea ananatis
KALILFSTRDGQTQKIASAIADEIKGQQSCDVINIQDAKTLDWQQYDRVLIGASIRYGHFQPVVNEFVKHNLLALQQRVSGFFSVNLTARKPEKRSPETNAYTVKFLAQSPWQPDCCAVFAGALYYPRYRWFDRVMIQFIMRMTGGETDASKEVEYTDWQQVQRFARDFAQLPGKSY

SEQ ID NO: 663 - protein, 180 aa, Escherichia coli
KTLILFSTRDGQTREIASYLASELKELGIQADVANVHRIEEPQWENYDRVVIGASIRYGHYHSAFQEFVKKHATRLNSMPSAFYSVNLVARKPEKRTPQTNSYARKFLMNSQWRPDRCAVIAGALRYPRYRWYDRFMIKLIMKMSGGETDTRKEVVYTDWEQVANFAREIAHLTDKPTLK

SEQ ID NO: 664 - protein, 177 aa, Erwinia toletana
KALILFSSREGQTREIASYIANSIKEEMECDVFNILRVEQIDWSQYDRVLIGGSIHYGHFHPAVAKFVKRHLHELQQRSSGFFCVNLTARKADKRTPQTNAYMRKFLLQSPWQPDCCAVFAGALRYTRYRWFDRVMIQLIMRMTGGETDTSKEVEYTDWTQVARFAQEFAHLPGKTQ

SEQ ID NO: 665 - protein, 178 aa, Pectobacterium carotovorum
KALIVFSSRDGQTRAIASYIANTLKGTLECDVVNVLNANDIDLSQYDRVAIGASIRYGRFHPAVNQFIRKHLTSLQQLPSAFFSVNLTARKPEKRTIQTNAYTRKFLLNSPWQPDLCCVFAGALRYPRYRWFDRVMIQLIMRITGGETDSTKEIEYTDWQQVARFAQDFAQLAAKNPA

SEQ ID NO: 666 - protein, 178 aa, Shimwellia blattae
KTLILFSTRDGQTHKIARHIAGVLEEQGKACELVDLLQPGEPDWSTVECVVLGASIRYGHFHKSFIRFVNTHAQRLNNMPGALFTVNLVARKPEKQSPQTNSYTRKFLAASPWQPQRCQVFAGALRYPRYSWYDRMMIRLIMKMAGGETDTRKEVEYTDWQSVTRFAREIAQLPGETR

SEQ ID NO: 667 - protein, 179 aa, Enterobacter cloacae
KTLILFSTRDGQTREIAAFLASELKEQGIYADVINLNRTEEIAWQEYDRVVIGASIRYGHFHPAVDRFVKKHTETLNSLPGAFFSVNLVARKAEKRTPQTNSYTRKFLLNSPWKPAACAVFAGALRYPRYRWYDRFMIRLIMKMTGGETDTRKEVVYTDWSQVASFAREIVQLTRSSRL

SEQ ID NO: 668 - protein, 178 aa, synthetic construct
  REGION 1..178: note = Recombinant
KALVLYSTRDGQTHAIASYIASCMKEKAECDVIDLTHGEHVNLTQYDQVLIGANIRYGHFNAVLDKFIKRNVDQLNNMPSAFFCVNLTARKPEKRTPQTNPYVRKFLLATPWQPALCGVFAGALRYPRYRWIDKVMIQLIMRMTGGETDTSKEVEYTDWEQVKKFAEDFAKLSYKKAL

SEQ ID NO: 669 - protein, 172 aa, synthetic construct
  REGION 1..172: note = Recombinant
KALVLYSTRDGQTHAIASYIASCMKEKAECDVIDLTHGEHVNLTQYDQVLIGASIRYGHFNAVLDKFIKRNVDQLNNMPSAFFCVNLTARKPEKRTPQTNPYVRKFLLATPWQPALCGVFAGALRYPRYRWIDKVMIQLIMRMTGGETDTSKEVEYTDWEQVKKFAEDFAKL

SEQ ID NO: 670 - protein, 179 aa, synthetic construct
  REGION 1..179: note = Recombinant
KTLILFSTRDGQTREIAAFLASELKEQGIYADVINLNRTEEIAWQEYDRVVIGASIRYGHFHPAVDRFVKKHTETLNSLPGAFFSVNLVARKAEKRTPQTNSYTRKFLLNSPWKPAACAVFAGALRYPRYRWYDRFMIRLIMKMTGGETDTRKEVVYTDWSQIASFAREIVQLTRSSRL

SEQ ID NO: 671 - protein, 504 aa, Amaranthus tuberculatus
MGNISEREEPTSAKRVAVVGAGVSGLAAAYKLKSHGLSVTLFEADSRAGGKLKTVKKDGFIWDEGANTMTESEAEVSSLIDDLGLREKQQLPISQNKRYIARDGLPVLLPSNPAALLTSNILSAKSKLQIMLEPFLWRKHNATELSDEHVQESVGEFFERHFGKEFVDYVIDPFVAGTCGGDPQSLSMHHTFPEVWNIEKRFGSVFAGLIQSTLLSKKEKGGENASIKKPRVRGSFSFQGGMQTLVDTMCKQLGEDELKLQCEVLSLSYNQKGIPSLGNWSVSSMSNNTSEDQSYDAVVVTAPIRNVKEMKIMKFGNPFSLDFIPEVTYVPLSVMITAFKKDKVKRPLEGFGVLIPSKEQHNGLKTLGTLFSSMMFPDRAPSDMCLFTTFVGGSRNRKLANASTDELKQIVSSDLQQLLGTEDEPSFVNHLFWSNAFPLYGHNYDSVLRAIDKMEKDLPGFFYAGNHKGGLSVGKAMASGCKAAELVISYLDSHIYVKMDEKTA

SEQ ID NO: 672 - DNA, 537 bp, synthetic construct
  source 1..537: mol_type = other DNA
  misc_feature 1..537: note = Recombinant
atgaaagcgctggtgctgtatagcacccgcgatggccagacccatgcgattgcgagctatattgcgagctgcatgaaagaaaaagcggaatgcgatgtgattgatctgacccatggcgaacatgtgaacctgacccagtatgatcaggtgctgattggcgcgagcattcgctatggccattttaacgcggtgctggataaatttattaaacgcaacgtggatcagctgaacaacatgccgagcgcgtttttttgcgtgaacctgaccgcgcgcaaaccggaaaaacgcaccccgcagaccaacccgtatgtgcgcaaatttctgctggcgaccccgtggcagccggcgctgtgcggcgtgtttgcgggcgcgctgcgctatccgcgctatcgctggattgataaagtgatgattcagctgattatgcgcatgaccggcggcgaaaccgataccagcaaagaagtggaatataccgattgggaacaggtgaaaaaatttgcggaagattttgcgaaactgagctataaaaaagcgctg

SEQ ID NO: 673 - DNA, 534 bp, synthetic construct
  source 1..534: mol_type = other DNA
  misc_feature 1..534: note = Recombinant
atgaaagcgctgattctgtttagcacccgcgatggccagacccagaaaattgcgagcgcgattgcggatgaaattaaaggccagcagagctgcgatgtgattaacattcaggatgcgaaaaccctggattggcagcagtatgatcgcgtgctgattggcgcgagcattcgctatggccattttcagccggtggtgaacgaatttgtgaaacataacctgctggcgctgcagcagcgcgtgagcggcttttttagcgtgaacctgaccgcgcgcaaaccggaaaaacgcagcccggaaaccaacgcgtataccgtgaaatttctggcgcagagcccgtggcagccggattgctgcgcggtgtttgcgggcgcgctgtattatccgcgctatcgctggtttgatcgcgtgatgattcagtttattatgcgcatgaccggcggcgaaaccgatgcgagcaaagaagtggaatataccgattggcagcaggtgcagcgctttgcgcgcgattttgcgcagctgccgggcaaaagctat

SEQ ID NO: 674 - DNA, 531 bp, synthetic construct
  source 1..531: mol_type = other DNA
  misc_feature 1..531: note = Recombinant
atgaaagcgctgattctgtatagcacccgcgatggccagacccgcaaaattgcgagcagcattgcggatgtgattcgccagcagcagcagtgcgatgtgctgaacattaaagatgcgagcctgccggattgggcgcagtatgatcgcgtgctgattggcgcgagcattcgctatggccattttcagccggtggtggataaatttgtgaaacagcatctgcatgaactgcagcagcgcaccagcggcttttttagcgtgaacctgaccgcgcgcaaaccggaaaaacgcagcccggaaaccaacgcgtatacccagaaatttctggcgcatagcccgtggcagccggattgctgcgcggtgtttgcgggcgcgctgtattatccgcgctatcgctggtttgatcgcgtgatgattcagctgattatgcgcatgaccggcggcgaaaccgatagcaccaaagaagtggaatataccgattggcagcaggtgagcacctttgcgaacgattttgcgcagctgccgggcaaaagc

SEQ ID NO: 675 - DNA, 546 bp, Escherichia coli; identical to SEQ ID NO: 570
  source 1..546: mol_type = unassigned DNA

SEQ ID NO: 676 - DNA, 534 bp, synthetic construct
  source 1..534: mol_type = other DNA
  misc_feature 1..534: note = Recombinant
atgaaagcgctgattctgtttagcagccgcgaaggccagacccgcgaaattgcgagctatattgcgaacagcattaaagaagaaatggaatgcgatgtgtttaacattctgcgcgtggaacagattgattggagccagtatgatcgcgtgctgattggcggcagcattcattatggccattttcatccggcggtggcgaaatttgtgaaacgccatctgcatgaactgcagcagcgcagcagcggctttttttgcgtgaacctgaccgcgcgcaaagcggataaacgcaccccgcagaccaacgcgtatatgcgcaaatttctgctgcagagcccgtggcagccggattgctgcgcggtgtttgcgggcgcgctgcgctatacccgctatcgctggtttgatcgcgtgatgattcagctgattatgcgcatgaccggcggcgaaaccgataccagcaaagaagtggaatataccgattggacccaggtggcgcgctttgcgcaggaatttgcgcatctgccgggcaaaacccag

SEQ ID NO: 677 - DNA, 537 bp, synthetic construct
  source 1..537: mol_type = other DNA
  misc_feature 1..537: note = Recombinant
atgaaagcgctgattgtgtttagcagccgcgatggccagacccgcgcgattgcgagctatattgcgaacaccctgaaaggcaccctggaatgcgatgtggtgaacgtgctgaacgcgaacgatattgatctgagccagtatgatcgcgtggcgattggcgcgagcattcgctatggccgctttcatccggcggtgaaccagtttattcgcaaacatctgaccagcctgcagcagctgccgagcgcgttttttagcgtgaacctgaccgcgcgcaaaccggaaaaacgcaccattcagaccaacgcgtatacccgcaaatttctgctgaacagcccgtggcagccggatctgtgctgcgtgtttgcgggcgcgctgcgctatccgcgctatcgctggtttgatcgcgtgatgattcagctgattatgcgcattaccggcggcgaaaccgatagcaccaaagaaattgaatataccgattggcagcaggtggcgcgctttgcgcaggattttgcgcagctggcggcgaaaaacccggcg

SEQ ID NO: 678 - DNA, 537 bp, synthetic construct
  source 1..537: mol_type = other DNA
  misc_feature 1..537: note = Recombinant
atgaagaccttgatcctattctccaccagggacggccaaacacacaagatcgcaaggcacatcgcaggagtcctcgaagagcaggggaaggcctgcgagttggtcgatctgttacagcccggcgaaccagactggagtaccgttgaatgcgtcgttctaggggccagcattagatatggtcacttccataagtctttcatcaggttcgtaaacactcacgcgcagcgcttgaataatatgccaggcgcccttttcacagttaacttagtcgcccgaaagcccgagaagcagagtccacagacgaactcttacacccgcaagtttctcgccgcctccccttggcagccacagcgatgccaagttttcgcgggcgctttgaggtaccctaggtactcgtggtacgacagaatgatgatacgtttgataatgaagatggccgggggcgagactgacacaaggaaggaggttgagtacactgactggcagtcggtgactcggttcgcgagggagatcgctcagctgccgggagagacgcgg

SEQ ID NO: 679 - DNA, 534 bp, synthetic construct
  source 1..534: mol_type = other DNA
  misc_feature 1..534: note = Recombinant
atgaaagcgctgattctgtttagcagccgcgatggccagacccagctgattgcgagcagcattgcgaaagaactggaaggcaaacaggcgtgcgatgtgctgaacattctggataccaccaacgtggaatggacccagtatgatcgcgtgctgattggcgcgagcattcgctatggccattttcatccggcggtggcggaatttgtgaaacgccatcagcgcgaactgcagcagcgcagcagcggcttttttagcgtgaacctgaccgcgcgcaaaccggaaaaacgcagcccggaaaccaacgcgtataccgcgaaatttctgaaccagagcccgtggcagccggattgctgcgcggtgtttgcgggcgcgctgcgctatccgcgctatcgctggtttgatcgcattatgattcagctgattatgcgcatgaccggcggcgaaaccgatagcagcaaagaagtggaatataccgattggcagcaggtgacccgctttgcgcaggaatttgcgcgcctgccgggcaaaaccagc

SEQ ID NO: 680 - DNA, 540 bp, synthetic construct
  source 1..540: mol_type = other DNA
  misc_feature 1..540: note = Recombinant
atgaaaaccctgattctgtttagcacccgcgatggccagacccgcgaaattgcggcgtttctggcgagcgaactgaaagaacagggcatttatgcggatgtgattaacctgaaccgcaccgaagaaattgcgtggcaggaatatgatcgcgtggtgattggcgcgagcattcgctatggccattttcatccggcggtggatcgctttgtgaaaaaacataccgaaaccctgaacagcctgccgggcgcgttttttagcgtgaacctggtggcgcgcaaagcggaaaaacgcaccccgcagaccaacagctatacccgcaaatttctgctgaacagcccgtggaaaccggcggcgtgcgcggtgtttgcgggcgcgctgcgctatccgcgctatcgctggtatgatcgctttatgattcgcctgattatgaaaatgaccggcggcgaaaccgatacccgcaaagaagtggtgtataccgattggagccaggtggcgagctttgcgcgcgaaattgtgcagctgacccgcagcagccgcctg

SEQ ID NO: 681 - DNA, 531 bp, synthetic construct
  source 1..531: mol_type = other DNA
  misc_feature 1..531: note = Recombinant
atgaaaattctgattctgtttagcacccgcgatggccagacccgcgaaattgcggcgagcctggcgagcgaactgaaagaacaggcgtttgatgtggatgtggtgaacctgcatcgcgcggaaaacattgcgtgggaagaatatgatggcgtggtgattggcgcgagcattcgctatggccattttcatagcaccctgaacagctttgtgaaaaaacatcagcaggcgctgaaaaaactgccgggcgcgttttatagcgtgaacctggtggcgcgcaaaccggaaaaacgcaccccgcagaccaacagctatacccgcaaatttctgctggatagcccgtggcagccggatctgagcgcggtgtttgcgggcgcgctgcgctatccgcgctataactggtatgatcgcattatgattcgcctgattatgaaaattaccggcggcgaaaccgatacccgcaaagaagtggtgtataccgattggcagcaggtgacccattttgcgcatgaaattgtgcagctggtgcgcaaa

SEQ ID NO: 682 - DNA, 540 bp, synthetic construct
  source 1..540: mol_type = other DNA
  misc_feature 1..540: note = Recombinant
atgaaggccttggtactgtactcgacgcgggacggccagacccacgcaattgcttcatacatcgcctcctgcatgaaggagaaggccgaatgcgacgtgatcgacctcacccacggggagcacgtgaacctcacccaatacgatcaggtgctaatcggtgcgagtattcgttacggccacttcaacgccgtgcttgacaagttcatcaagagaaacgtggatcagctgaacaacatgccaagcgcgttcttctgcgtaaacctcacagcaaggaagcccgagaagcgtactccccagacaaacccttatgtccgaaaattcttgcttgctaccccctggcagcccgcgttgtgcggagtgttcgcaggggcccttcggtacccgcgataccggtggatcgacaaggtgatgatccagctaataatgcggatgactgggggagagacagacacgagcaaggaggtcgagtacacggattgggagcaggttaagaagttcgcggaggattttgcaaagctatcgtacaagaaggccctctag

SEQ ID NO: 683 - DNA, 537 bp, synthetic construct
  source 1..537: mol_type = other DNA
  misc_feature 1..537: note = Recombinant
atgaaggccttgatcctgttctctacacgcgacggacagacacagaagatcgcatctgccatcgctgatgagataaaggggcagcaatcgtgcgacgtgattaacatacaggatgccaaaaccctcgactggcagcagtacgaccgggtactcatcggcgcctccattcgttacgggcatttccagcccgttgtgaatgagtttgtcaagcacaacctcttggccctacagcagagagtttccggattcttctccgtgaacttgacagcccgaaagccagagaagcggagccccgagactaacgcttatacagtcaaattcttggcgcagtcaccctggcaaccggactgctgcgctgtttttgcgggggccctgtactacccacggtaccggtggttcgatagggtgatgatacagttcataatgcgaatgacggggggagagaccgacgcatcgaaagaggtggagtacactgactggcagcaggtgcagcggttcgcgcgagacttcgcgcagttaccgggtaagtcctactga

SEQ ID NO: 684 - DNA, 534 bp, synthetic construct
  source 1..534: mol_type = other DNA
  misc_feature 1..534: note = Recombinant
atgaaggcgctgatcttgtactcaaccagggacggtcagactcgcaagattgcaagtagcattgcggacgtcatcaggcagcagcagcagtgcgacgtcttaaacattaaagacgcatcacttcctgactgggcccaatatgaccgagtgctcatcggagctagcatccgttacgggcatttccagcccgttgtagacaagttcgtgaagcagcacttgcacgagcttcagcagcggacctccggcttcttctccgtgaacctgacggcgaggaagcctgaaaaaaggagccctgagaccaatgcctacacccagaaattcttggcgcactccccttggcagcccgattgctgtgccgttttcgcgggggccctttactaccccaggtaccgttggttcgaccgggtgatgatccagttgattatgcgcatgactggtggagagaccgactctaccaaggaagtggagtacactgactggcagcaggtgagtaccttcgccaacgattttgcccagcttccaggcaagagctaa

SEQ ID NO: 685 - DNA, 546 bp, synthetic construct
  source 1..546: mol_type = other DNA
  misc_feature 1..546: note = Recombinant
atgaagaccttgattctattctccacaagggacggccagactagggagatcgcttcctacctggccagcgagctaaaggagcttggcattcaggcagacgtggctaacgtgcaccgaattgaggagccgcagtgggagaactacgatcgggtcgtgatcggcgccagcatccggtatggacactaccacagcgcgttccaggagttcgtgaaaaagcacgcgacccgtctgaatagcatgccatcagcgttctactcggtcaacctcgtggctcgtaagcccgagaagcggacaccccagaccaactcgtatgccaggaagttccttatgaactcgcagtggcgaccggaccgctgcgcggtgatcgccggtgcgctcaggtaccctcgttataggtggtacgacaggtttatgattaaacttataatgaaaatgagcggcggagagaccgacaccagaaaagaggtggtttacacagactgggagcaggtagcaaacttcgctagggagattgctcacctcaccgacaagccgaccttgaagtaa

SEQ ID NO: 686 - DNA, 537 bp, synthetic construct
  source 1..537: mol_type = other DNA
  misc_feature 1..537: note = Recombinant
atgaaggcccttatactgttcagttccagagaaggccagacgagggagatagcgagttacattgccaactcgataaaggaggaaatggaatgcgacgtgttcaacatccttcgtgtggagcagatcgactggtctcaatacgaccgcgtcctgatcgggggctcgatacactacggccatttccacccagcggtggcaaaatttgtcaagaggcacctccatgagttgcaacagaggtcttccggctttttctgcgtcaacctgacggccaggaaggccgacaagcggactccccagaccaatgcctacatgagaaagttcttgttgcagtccccatggcaacccgattgctgcgccgtgtttgcgggggcccttaggtacacccgttacaggtggttcgacagggtaatgattcagctgatcatgaggatgacgggcggagagactgacacatcgaaggaggtggagtacacagactggacgcaggtcgcccgcttcgcgcaggagttcgcccatttgcccggcaaaactcagtga

SEQ ID NO: 687 - DNA, 540 bp, synthetic construct
  source 1..540: mol_type = other DNA
  misc_feature 1..540: note = Recombinant
atgaaggctcttatcgtattctcttcgagggatggccaaacccgagcgatcgcgtcttatattgctaataccctcaaagggaccctagagtgcgacgtcgtcaacgtcctcaatgctaacgacattgatttgagccagtacgaccgtgtggccattggcgcctccattcgctacgggaggttccacccagctgttaaccagtttatccggaagcaccttacgagcctccagcagctaccatctgcgttcttctccgtgaacctcacagctcggaagcccgagaagaggactatacaaaccaacgcgtacactaggaagtttctactgaactcgccgtggcagccggacctgtgctgcgtgttcgcgggagcccttcgctatccccgttacaggtggtttgaccgagtgatgattcaactcataatgcgcataacggggggcgagacagactccaccaaggagatcgagtacaccgactggcagcaggtcgcgcgattcgcccaggattttgcacagcttgccgcaaagaacccggcatga

SEQ ID NO: 688 - DNA, 540 bp, synthetic construct
  source 1..540: mol_type = other DNA
  misc_feature 1..540: note = Recombinant
atgaagaccttgatcctattctccaccagggacggccaaacacacaagatcgcaaggcacatcgcaggagtcctcgaagagcaggggaaggcctgcgagttggtcgatctgttacagcccggcgaaccagactggagtaccgttgaatgcgtcgttctaggggccagcattagatatggtcacttccataagtctttcatcaggttcgtaaacactcacgcgcagcgcttgaataatatgccaggcgcccttttcacagttaacttagtcgcccgaaagcccgagaagcagagtccacagacgaactcttacacccgcaagtttctcgccgcctccccttggcagccacagcgatgccaagttttcgcgggcgctttgaggtaccctaggtactcgtggtacgacagaatgatgatacgtttgataatgaagatggccgggggcgagactgacacaaggaaggaggttgagtacactgactggcagtcggtgactcggttcgcgagggagatcgctcagctgccgggagagacgcggtag

SEQ ID NO: 689 - DNA, 537 bp, synthetic construct
  source 1..537: mol_type = other DNA
  misc_feature 1..537: note = Recombinant
atgaaggccctaattttattcagtagtagggacggccagacccagcttatagcatcgtctatcgccaaggagctcgaagggaagcaggcgtgcgacgtgttgaatatcctcgacacgactaatgtggagtggacccagtacgaccgcgtgctgattggagcatccatccggtacgggcactttcaccctgcggtcgccgagttcgtaaagcgtcaccagcgagagctacagcagagaagtagtggctttttctctgtgaacttgacggcccgtaagccggaaaagaggtcccccgagactaacgcctataccgccaagttccttaaccaaagtccatggcagcctgactgttgcgctgtgttcgctggggctttgcgataccctcggtaccgctggttcgacagaattatgatccagctaatcatgcggatgactgggggtgagacagattcttcaaaggaggtcgagtacaccgactggcagcaggtgacccgcttcgcgcaagagttcgccaggcttccgggaaagaccagttga

SEQ ID NO: 690 - DNA, 543 bp, synthetic construct
  source 1..543: mol_type = other DNA
  misc_feature 1..543: note = Recombinant
atgaagaccctaatactgttctctacccgcgacgggcagacaagggagatcgccgcgttccttgcctcggagctgaaggagcaggggatttacgctgacgtcataaaccttaaccggacggaggagatagcttggcaggagtatgatagagtcgtaatcggggcgtcgatccgatacgggcatttccaccctgctgtcgaccgcttcgtgaagaagcacacagagacactcaactcactgcccggcgcctttttctctgtaaaccttgttgcccggaaagccgagaagagaacgccgcagacgaactcatacaccaggaagttcctattaaacagcccgtggaagccagcggcctgcgcggtctttgctggggccctccgctaccctagataccgctggtacgacaggttcatgatacgactgattatgaaaatgacaggcggggagacggatacccgaaaggaggtagtctacactgactggtcgcaggtcgcgtcgtttgccagagagatagtccagttgaccaggtcatcgcgcttgtga

SEQ ID NO: 691 - DNA, 534 bp, synthetic construct
  source 1..534: mol_type = other DNA
  misc_feature 1..534: note = Recombinant
atgaagatattaatccttttctccacccgtgacggccaaacccgtgagattgcggcgtccttggcgtccgaactcaaggagcaggcattcgacgtggacgtcgtcaaccttcaccgggccgagaacatcgcatgggaggagtacgacggtgttgtcatcggagcgtccatcaggtacggccactttcatagtaccctgaactcatttgtcaagaagcatcagcaggctcttaagaagcttcccggggctttctacagcgtgaacctcgtcgcccggaagcctgagaagcgcacaccgcagaccaatagctacacccgcaagttcctcttggattccccgtggcagcccgacctttcagccgtgttcgccggggcactcaggtaccctcggtacaattggtacgaccgtatcatgattagacttatcatgaagattacaggcggcgagactgataccaggaaggaagtagtctacacagactggcagcaggtcactcactttgctcacgagatcgtccagctcgtgcggaagtag

SEQ ID NO: 692 - DNA, 537 bp, synthetic construct
  source 1..537: mol_type = other DNA
  misc_feature 1..537: note = Recombinant
aaggccttggtactgtactcgacgcgggacggccagacccacgcaattgcttcatacatcgcctcctgcatgaaggagaaggccgaatgcgacgtgatcgacctcacccacggggagcacgtgaacctcacccaatacgatcaggtgctaatcggtgcgagtattcgttacggccacttcaacgccgtgcttgacaagttcatcaagagaaacgtggatcagctgaacaacatgccaagcgcgttcttctgcgtaaacctcacagcaaggaagcccgagaagcgtactccccagacaaacccttatgtccgaaaattcttgcttgctaccccctggcagcccgcgttgtgcggagtgttcgcaggggcccttcggtacccgcgataccggtggatcgacaaggtgatgatccagctaataatgcggatgactgggggagagacagacacgagcaaggaggtcgagtacacggattgggagcaggttaagaagttcgcggaggattttgcaaagctatcgtacaagaaggccctctag

SEQ ID NO: 693 - DNA, 534 bp, synthetic construct
  source 1..534: mol_type = other DNA
  misc_feature 1..534: note = Recombinant
aaggccttgatcctgttctctacacgcgacggacagacacagaagatcgcatctgccatcgctgatgagataaaggggcagcaatcgtgcgacgtgattaacatacaggatgccaaaaccctcgactggcagcagtacgaccgggtactcatcggcgcctccattcgttacgggcatttccagcccgttgtgaatgagtttgtcaagcacaacctcttggccctacagcagagagtttccggattcttctccgtgaacttgacagcccgaaagccagagaagcggagccccgagactaacgcttatacagtcaaattcttggcgcagtcaccctggcaaccggactgctgcgctgtttttgcgggggccctgtactacccacggtaccggtggttcgatagggtgatgatacagttcataatgcgaatgacggggggagagaccgacgcatcgaaagaggtggagtacactgactggcagcaggtgcagcggttcgcgcgagacttcgcgcagttaccgggtaagtcctactga

SEQ ID NO: 694 - DNA, 543 bp, synthetic construct
  source 1..543: mol_type = other DNA
  misc_feature 1..543: note = Recombinant
aagaccttgattctattctccacaagggacggccagactagggagatcgcttcctacctggccagcgagctaaaggagcttggcattcaggcagacgtggctaacgtgcaccgaattgaggagccgcagtgggagaactacgatcgggtcgtgatcggcgccagcatccggtatggacactaccacagcgcgttccaggagttcgtgaaaaagcacgcgacccgtctgaatagcatgccatcagcgttctactcggtcaacctcgtggctcgtaagcccgagaagcggacaccccagaccaactcgtatgccaggaagttccttatgaactcgcagtggcgaccggaccgctgcgcggtgatcgccggtgcgctcaggtaccctcgttataggtggtacgacaggtttatgattaaacttataatgaaaatgagcggcggagagaccgacaccagaaaagaggtggtttacacagactgggagcaggtagcaaacttcgctagggagattgctcacctcaccgacaagccgaccttgaagtaa

SEQ ID NO: 695 - DNA, 534 bp, synthetic construct
  source 1..534: mol_type = other DNA
  misc_feature 1..534: note = Recombinant
aaggcccttatactgttcagttccagagaaggccagacgagggagatagcgagttacattgccaactcgataaaggaggaaatggaatgcgacgtgttcaacatccttcgtgtggagcagatcgactggtctcaatacgaccgcgtcctgatcgggggctcgatacactacggccatttccacccagcggtggcaaaatttgtcaagaggcacctccatgagttgcaacagaggtcttccggctttttctgcgtcaacctgacggccaggaaggccgacaagcggactccccagaccaatgcctacatgagaaagttcttgttgcagtccccatggcaacccgattgctgcgccgtgtttgcgggggcccttaggtacacccgttacaggtggttcgacagggtaatgattcagctgatcatgaggatgacgggcggagagactgacacatcgaaggaggtggagtacacagactggacgcaggtcgcccgcttcgcgcaggagttcgcccatttgcccggcaaaactcagtga

SEQ ID NO: 696 - DNA, 537 bp, synthetic construct
  source 1..537: mol_type = other DNA
  misc_feature 1..537: note = Recombinant
aaggctcttatcgtattctcttcgagggatggccaaacccgagcgatcgcgtcttatattgctaataccctcaaagggaccctagagtgcgacgtcgtcaacgtcctcaatgctaacgacattgatttgagccagtacgaccgtgtggccattggcgcctccattcgctacgggaggttccacccagctgttaaccagtttatccggaagcaccttacgagcctccagcagctaccatctgcgttcttctccgtgaacctcacagctcggaagcccgagaagaggactatacaaaccaacgcgtacactaggaagtttctactgaactcgccgtggcagccggacctgtgctgcgtgttcgcgggagcccttcgctatccccgttacaggtggtttgaccgagtgatgattcaactcataatgcgcataacggggggcgagacagactccaccaaggagatcgagtacaccgactggcagcaggtcgcgcgattcgcccaggattttgcacagcttgccgcaaagaacccggcatga

SEQ ID NO: 697 - DNA, 537 bp, synthetic construct
  source 1..537: mol_type = other DNA
  misc_feature 1..537: note = Recombinant
aagaccttgatcctattctccaccagggacggccaaacacacaagatcgcaaggcacatcgcaggagtcctcgaagagcaggggaaggcctgcgagttggtcgatctgttacagcccggcgaaccagactggagtaccgttgaatgcgtcgttctaggggccagcattagatatggtcacttccataagtctttcatcaggttcgtaaacactcacgcgcagcgcttgaataatatgccaggcgcccttttcacagttaacttagtcgcccgaaagcccgagaagcagagtccacagacgaactcttacacccgcaagtttctcgccgcctccccttggcagccacagcgatgccaagttttcgcgggcgctttgaggtaccctaggtactcgtggtacgacagaatgatgatacgtttgataatgaagatggccgggggcgagactgacacaaggaaggaggttgagtacactgactggcagtcggtgactcggttcgcgagggagatcgctcagctgccgggagagacgcggtag

SEQ ID NO: 698 - DNA, 540 bp, synthetic construct
  source 1..540: mol_type = other DNA
  misc_feature 1..540: note = Recombinant
aagaccctaatactgttctctacccgcgacgggcagacaagggagatcgccgcgttccttgcctcggagctgaaggagcaggggatttacgctgacgtcataaaccttaaccggacggaggagatagcttggcaggagtatgatagagtcgtaatcggggcgtcgatccgatacgggcatttccaccctgctgtcgaccgcttcgtgaagaagcacacagagacactcaactcactgcccggcgcctttttctctgtaaaccttgttgcccggaaagccgagaagagaacgccgcagacgaactcatacaccaggaagttcctattaaacagcccgtggaagccagcggcctgcgcggtctttgctggggccctccgctaccctagataccgctggtacgacaggttcatgatacgactgattatgaaaatgacaggcggggagacggatacccgaaaggaggtagtctacactgactggtcgcaggtcgcgtcgtttgccagagagatagtccagttgaccaggtcatcgcgcttgtga

SEQ ID NO: 699 - DNA, 537 bp, synthetic construct
  source 1..537: mol_type = other DNA
  misc_feature 1..537: note = Recombinant
aaggccttggtactgtactcgacgcgggacggccagacccacgcaattgcttcatacatcgcctcctgcatgaaggagaaggccgaatgcgacgtgatcgacctcacccacggggagcacgtgaacctcacccaatacgatcaggtgctaatcggtgcgagtattcgttacggccacttcaacgccgtgcttgacaagttcatcaagagaaacgtggatcagctgaacaacatgccaagcgcgttcttctgcgtaaacctcacggcaaggaagcccgagaagcgtactccccagacaaacccttatgtccgaaaattcttgcttgctaccccctggcagcccgcgttgtgcggagtgttcgcaggggcccttcggtacccgcgataccggtggatcgacaaggtgatgatccagctaataatgcggatgactgggggagagacagacacgagcaaggaggtcgagtacacggattgggagcaggttaagaagttcgcggaggattttgcaaagctatcgtacaagaaggccctctag

SEQ ID NO: 700 - DNA, 537 bp, synthetic construct
  source 1..537: mol_type = other DNA
  misc_feature 1..537: note = Recombinant
aaggccttggtactgtactcgacgcgggacggccagacccacgcaattgcttcatacatcgcctcctgcatgaaggagaaggccgaatgcgacgtgatcgacctcacccacggggagcacgtgaacctcacccaatacgatcaggtgctaatcggtgcgaatattcgttacggccacttcaacgccgtgcttgacaagttcatcaagagaaacgtggatcagctgaacaacatgccaagcgcgttcttctgcgtaaacctcacagcaaggaagcccgagaagcgtactccccagacaaacccttatgtccgaaaattcttgcttgctaccccctggcagcccgcgttgtgcggagtgttcgcaggggcccttcggtacccgcgataccggtggatcgacaaggtgatgatccagctaataatgcggatgactgggggagagacagacacgagcaaggaggtcgagtacacggattgggagcaggttaagaagttcgcggaggattttgcaaagctatcgtacaagaaggccctctag

SEQ ID NO: 701 - DNA, 537 bp, synthetic construct
  source 1..537: mol_type = other DNA
  misc_feature 1..537: note = Recombinant
aaggccttggtactgtactcgacgcgggacggccagacccacgcaattgcttcatacatcgcctcctgcatgaaggagaaggccgaatgcgacgtgatcgacctcacccacggggagcacgtgaacctcacccaatacgatcaggtgctaatcggtgcgagtattcgttacggccacttcaacgccgtgcttgacaagttcatcaagagaaacgtggatcagctgaacaacatgccaagcgcgttcttctgcgtaaacctcacagcaaggaagcccgagaagcgtactccccagacaaacccttatgtccgaaaattcttgcttgctaccccctggcagcccgcgttgtgcggagtgttcgcaggggcccttcggtacccgcgataccggtggatcgacaaggtgatgatccagctaataatgcggatgactgggggagagacagacacgagcaaggaggtcgagtacacggattgggagcaggttaagaagttcgcggaggattttgcaaagctatagtacaagaaggccctctag

SEQ ID NO: 702 - DNA, 534 bp, synthetic construct
  source 1..534: mol_type = other DNA
  misc_feature 1..534: note = Recombinant
aaggccttgatcctgttctctacacgcgacggacagacacagaagatcgcatctgccatcgctgatgagataaaggggcagcaatcgtgcgacgtgattaacatacaggatgccaaaaccctcgactggcagcagtacgaccgggtactcatcggcgcctccattcgttacgggcatttccagcccgttgtgaatgagtttgtcaagcacaacctcttggccctacagcagagagtttccggattcttctccgtgaacttgacagcccgaaagccagagaagcggagccccgagactaacgcttatacagtcaaattcttggcgcagtcaccctggcaaccggactgctgcgctgtttttgcgggggccctgtactacccacggtaccggtggttcgatagggtgatgatacagttcataatgcgaatgacggggggggagaccgacgcatcgaaagaggtggagtacactgactggcagcaggtgcagcggttcgcgcgagacttcgcgcagttaccgggtaagtcctactga

SEQ ID NO: 703 - DNA, 540 bp, synthetic construct
  source 1..540: mol_type = other DNA
  misc_feature 1..540: note = Recombinant
aagaccctaatactgttctctacccgcgacgggcagacaagggagatcgccgcgttccttgcctcggagctgaaggagcaggggatttacgctgacgtcataaaccttaaccggacggaggagatagcttggcaggagtatgatagagtcgtaatcggggcgtcgatccgatacgggcatttccaccctgctgtcgaccgcttcgtgaagaagcacacagagacactcaactcactgcccggcgcctttttctctgtaaaccttgttgcccggaaagccgagaagagaacgccgcagacgaactcatacaccaggaagttcctattaaacagcccgtggaagccagcggcctgcgcggtctttgctggggccctccgctaccctagataccgctggtacgacaggttcatgatacgactgattatgaaaatgacaggcggggagacggatacccgaaaggaggtagtctacactgactggtcgcagatcgcgtcgtttgccagagagatagtccagttgaccaggtcatcgcgcttgtga

SEQ ID NO: 704 - DNA, 540 bp, synthetic construct
  source 1..540: mol_type = other DNA
  misc_feature 1..540: note = Recombinant
atgaaggcgctcgtgctctacagcacacgcgacggccagactcatgcgatcgcctcttacatcgcgtcctgtatgaaggagaaggccgagtgcgacgtcatcgatctcacgcacggggagcacgtgaatcttacgcagtacgaccaagtgctgataggcgcctctatccgttacggccattttaacgccgtcctcgacaaattcatcaagcgcaatgtagaccagctgaacaacatgccctccgcgttcttttgcgtgaacctgacggctcggaagcctgagaagcgaacacctcagaccaacccatacgtgcggaaattcctactcgcaacgccatggcagcccgccctgtgcggggttttcgcaggggcgctacgctatccgcgttaccgctggatcgataaggtgatgatccagctaataatgcgcatgaccggcggcgagacagacacatcgaaggaagtcgaatacacagactgggaacaggtgaagaagtttgcagaggatttcgccaagctctcatacaaaaaggcattgtga

SEQ ID NO: 705 - DNA, 537 bp, synthetic construct
  source 1..537: mol_type = other DNA
  misc_feature 1..537: note = Recombinant
atgaaggcgcttatactgttctcgacacgcgacggtcagacgcagaaaatcgcctcagccatcgccgacgagatcaagggccagcagagctgcgatgtgatcaatattcaggacgccaaaactctcgactggcagcagtatgaccgcgtgctcattggcgcatcaatccgctacgggcatttccagccagtcgtcaatgagtttgtgaaacataacctcttggcattgcagcagcgggtgtctggcttcttctccgtgaaccttacagctagaaaaccagagaagcggtcgcccgagactaacgcctacaccgttaagttccttgcgcagtcaccgtggcagcctgattgctgcgcggtcttcgccggggcactgtactaccctcgataccggtggtttgatagggtaatgatccagttcataatgcgcatgaccggtggggagaccgacgcaagtaaagaagttgagtacacggattggcagcaggtgcaaaggttcgcacgcgacttcgcgcagctcccgggcaagtcttactga

SEQ ID NO: 706 - DNA, 534 bp, synthetic construct
  source 1..534: mol_type = other DNA
  misc_feature 1..534: note = Recombinant
atgaaagccctgatcctctattccaccagggacggccagacccgcaagatagcctcctccatcgctgatgtcatccgccagcagcagcagtgcgacgttttaaacattaaggacgcttcactgcctgattgggcccagtatgaccgcgtcctgatcggcgcgtcgattcggtacggccacttccagcctgtggttgacaagttcgtcaagcagcacctgcatgagctgcagcagcgaactagcgggttcttcagtgtgaacctgacagctagaaagcccgaaaagagatccccagaaaccaacgcctatacgcagaaattccttgctcactcaccctggcagcctgactgttgtgccgtcttcgcgggcgccttgtactatccccgctaccgctggttcgatagggtgatgatccagctgattatgagaatgacgggaggggagaccgattcgaccaaggaggtagagtacactgactggcaacaggtgtcaactttcgcaaacgacttcgcacaactacccggtaagtcttga

SEQ ID NO: 707 - DNA, 546 bp, synthetic construct
  source 1..546: mol_type = other DNA
  misc_feature 1..546: note = Recombinant
atgaaaaccctaatactgttctcgacccgcgacggccagacgcgtgagattgcgagctacctggcctccgagctcaaggagctggggatccaagccgatgtcgcgaacgtgcaccgcattgaggagccgcagtgggagaattacgatcgcgttgtgataggggccagcatccgctatggccactaccactcggcctttcaggagtttgtaaagaaacacgccacaagattaaactccatgcctagcgccttctactccgtcaaccttgtcgcgcgcaagccggagaagcggacacctcagacgaactcctacgcgcggaagttcctgatgaacagccagtggcggccggacagatgtgctgttattgcgggagccctgagatacccgaggtaccggtggtacgataggtttatgattaaacttattatgaagatgtctggtggggagactgacaccaggaaggaggtggtatatacagactgggagcaggtcgccaatttcgctcgggaaatcgcgcatctgacagacaagcctacactgaagtag

SEQ ID NO: 708 - DNA, 537 bp, synthetic construct
  source 1..537: mol_type = other DNA
  misc_feature 1..537: note = Recombinant
atgaaggccctgatcctctttagctctagggagggccagacccgcgagatcgcgtcatatatcgcgaattccataaaggaggagatggagtgcgatgtgtttaacatccttagggtggagcaaatagactggtctcagtatgaccgtgtgctcataggggggagcatccactacggccactttcacccggccgtggcgaaattcgtcaagcgacacctccacgagcttcagcagcgctcctcagggttcttctgcgtcaacctgacagcaagaaaggcagataaacgcaccccgcagacgaacgcctacatgaggaagttccttctgcagtctccttggcagcccgattgctgcgcggtgttcgccggtgcactgcgctatacgcgctatagatggtttgatagagtcatgattcagctcatcatgcggatgaccggcggggaaacggatactagtaaggaggtggagtacacggactggacccaggtggcacgtttcgcccaggagtttgcacatcttcctgggaagacccaatga

SEQ ID NO: 709 - DNA, 540 bp, synthetic construct
  source 1..540: mol_type = other DNA
  misc_feature 1..540: note = Recombinant
atgaaggcgctaattgtgttcagctccagggatggccagacgagggctatagcatcctatatcgccaataccttgaaaggaacgctcgagtgtgacgtggtcaacgtcttgaacgccaatgacattgacctttcccagtacgaccgagttgccataggcgcgtcgatccgctacgggcgatttcaccctgcagtcaaccagtttatacggaagcatttgacctcgctgcagcagctcccgtcagccttcttctctgtgaatttaaccgcgcggaagcctgagaaacggacgatccaaacaaacgcctatacccgaaagttcctcctgaacagcccatggcagccagacctgtgctgtgtcttcgccggcgcgttgcggtatccccgctacaggtggttcgatagagtgatgatccagctcatcatgaggatcaccgggggagagaccgatagtaccaaggagatcgagtacacggactggcagcaggtggctcgcttcgcccaggacttcgctcagttggccgcaaagaatccagcataa

SEQ ID NO: 710 - DNA, 540 bp, synthetic construct
  source 1..540: mol_type = other DNA
  misc_feature 1..540: note = Recombinant
atgaagacactgatcctgttctcgactcgagatggccagactcataaaattgcgcgccacattgcgggggtcctggaggagcagggcaaagcgtgcgagctcgtggacttactccagcccggggagccggactggagcacggtggagtgcgtcgttctgggcgcttccatacgttacgggcatttccacaaaagtttcatccggttcgtcaacacccacgctcaacggctgaacaacatgcctggcgcgctattcactgttaacttagtggctcgtaagcccgagaagcagtctccgcagactaactcctacacaaggaaatttctagcagcaagcccatggcaaccgcagcggtgccaggtgttcgctggagctctgcgctatcctaggtacagttggtacgacagaatgatgatacggttgattatgaagatggcaggcggggagacggacaccaggaaagaggtcgaatacactgactggcaatcagtcactcggtttgctagagagatcgcgcaattaccaggtgagacgcggtaa

SEQ ID NO: 711 - DNA, 537 bp, synthetic construct
  source 1..537: mol_type = other DNA
  misc_feature 1..537: note = Recombinant
atgaaggctctcatactgttcagctcgagagacgggcagacccagctgatcgcctcctccatagcaaaggagctagagggcaagcaagcctgcgacgtgctcaatattctcgacacaaccaacgtggagtggactcagtacgacagagtcctaatcggcgcgtccatcagatacggccacttccatcccgccgtcgctgaattcgtgaaacgccaccagcgtgagctccagcagcgcagcagcggcttcttcagcgtgaatcttactgcgagaaagccggaaaagcggagtcccgagactaacgcttatacggcaaagttcctcaaccaatctccctggcaaccagactgctgtgccgtgttcgctggggcactgaggtatccgcgctatcggtggttcgatagaatcatgatacagctgataatgcgtatgactggtggggagacggattccagtaaagaggtagagtatactgattggcagcaggtcactaggttcgcgcaggagtttgctaggctgccgggcaagacatcctga

SEQ ID NO: 712 - DNA, 543 bp, synthetic construct
  source 1..543: mol_type = other DNA
  misc_feature 1..543: note = Recombinant
atgaaaaccttaatcttgttcagcacccgcgacggccagacgcgtgaaatcgcagcgttcctcgcttcggagctcaaggaacagggaatttacgccgacgtcattaacctaaaccgtaccgaagagattgcgtggcaggagtatgaccgcgtggtgattggcgcttctatccgctatggccacttccacccggctgttgaccggttcgtgaagaagcacacggagaccttgaactcactgccgggggcattctttagcgtaaatctggtggcgcgcaaggccgagaagcgcaccccccagacgaacagctacacccgcaaatttttacttaactccccatggaaacctgcggcctgcgcagtgttcgcaggagctctccgctatcctcgctatcgatggtacgatcggttcatgattcggctgattatgaaaatgacgggcggcgagacggatacgcgaaaggaagttgtctacactgactggtcccaggtggcctcgtttgcaagggagatcgtacagctcactcgatctagtaggctctga

SEQ ID NO: 713 - DNA, 534 bp, synthetic construct
  source 1..534: mol_type = other DNA
  misc_feature 1..534: note = Recombinant
atgaagattctcatcttattttccacccgagacggccaaacccgcgagattgcggcgtccctcgcctccgagttgaaggagcaggcgtttgatgtggatgtggtcaacctccaccgcgcagaaaacatagcgtgggaggagtacgatggggtcgtcatcggagcgtcaatccgctacggacatttccactcaacgctgaattcatttgtgaagaagcaccaacaagcgctcaagaagctgcccggagcattctacagcgtcaacctcgtggctcggaagccggaaaagcgcaccccgcaaacaaacagctacacacgcaagtttctgctcgactcgccctggcaacccgacctgagtgccgttttcgccggggcactgcgctatccccgttacaactggtacgatcgcataatgattcgactgatcatgaagattacaggcggggaaaccgatactcggaaggaggtggtgtatacagactggcagcaggttacccacttcgcccacgagatcgtccagctcgttcgtaagtga

SEQ ID NO: 714 - protein, 442 aa, Xanthomonas campestris
MQTQPVIIAGAGIAGLSIAYELQQKGIPYEIMEASSYAGGVVKSLHIDGYELDAGPNSLAASAAFMAYIDQLGLQDQVLEAAAASKNRFLVRNDKLHAVSPHPFKILQSAYISGGAKWRLFTERFRKAAAPEGEETVSSFVTRRFGKEINDYLFEPVLSGIYAGNPDLMSVGEVLPMLPQWEQKYGSVTQGLLKNKGAMGGRKIIAFKGGNATLTNRLQSLLSGKIRFNCAVTGVTRGADDYIVQYTENGNTAMLNASRVIFTTPAYSTAVAIQALDASLATHLSDVPYPRMGVLHLGFGAEARQKAPAGFGFLVPHAAGKHFLGAICNSAIFPSRVPTGKVLFTVFLGGARQEQLFDQLGPEKLQQTVVKELMELLGLTTPPEMQRFSEWNRAIPQLNVGYAQTRQQIGVFEQRYPGIRLAGNYVTGVAVPAIIQAAKGYC

SEQ ID NO: 715 - protein, 448 aa, Chitinophaga pinensis
MSDQPVLIVGAGLSGLSIAYELQKLQVPYQVLEVSGHSGGVMKSLRKDGFELDAGANTIAASPEILAYFTSLGLENEILQATAASKHRFLVRRRQLHAVSPHPFKIMSSPYLSRGSKWRLFTERFRKPVVASGEETVTDFITRRFNREIAEYVFDPVLSGIYAGNPDQMSIAEVLPALPRWEREYGSVTKGLMKDKGAMGGRKIISFKGGNQLLTNRLQQLLTTPVRFNCKVTGITASNGGYIVSAVEDGVSESYTASRVILTTPAYSAAATITNLDAATAALLNEIHYPRMGVLHLGFDATALPQPLDGFGFLVPNAENMHFLGAICNAAIFPDKAPPGKILFTVFLGGARQESLFDQMTPEALQQQVVSEVMSLLHLSAPPVMQHFSSWNKAIPQLNVGHVKLRRAVEAFEKKYPGIHLSGNYLQGVAIPALLQHAAALAASLKKN

SEQ ID NO: 716 - protein, 470 aa, Bacillus subtilis
MSDGKKHVVIIGGGITGLAAAFYMEKEIKEKNLPLELTLVEASPRVGGKIQTVKKDGYIIERGPDSFLERKKSAPQLVKDLGLEHLLVNNATGQSYVLVNRTLHPMPKGAVMGIPTKIAPFVSTGLFSLSGKARAAMDFILPASKTKDDQSLGEFFRRRVGDEVVENLIEPLLSGIYAGDIDKLSLMSTFPQFYQTEQKHRSLILGMKKTRPQGSGQQLTAKKQGQFQTLSTGLQTLVEEIEKQLKLTKVYKGTKVTKLSHSGSGYSLELDNGVTLDADSVIVTAPHKAAAGMLSELPAISHLKNMHSTSVANVALGFPEGSVQMEHEGTGFVISRNSDFAITACTWTNKKWPHAAPEGKTLLRAYVGKAGDESIVDLSDNDIINIVLEDLKKVMNINGEPEMTCVTRWHESMPQYHVGHKQRIKELREALASAYPGVYMTGASFEGVGIPDCIDQGKAAVSDALTYLFS

SEQ ID NO: 717 - protein, 470 aa, Bacillus pumilus
MHDNQKHLVIIGGGITGLAAAFYLEKEVEEKGLPIQISLIEASPRLGGKIQTLYKDGYIIERGPDSFLERKVSGPQLAKDVGLSDQLVNNETGQAYVLVNEKLHPMPKGAVMGIPTQISPFITTGLFSVAGKARAAMDFVLPKSKQTEDQSLGEFFRRRVGDEVVENLIEPLLSGIYAGDIDRLSLMSTFPQFYQTEQQHRSLILGMKKSQQHAKAQQVTAKKQGQFQTINQGLQSLVEAVEGKLKLTTVYKGTKVKQIEKTDGGYGLQLDSGQTLFADSAIVTTPHQSIYSMFPKEAGLEYLHDMTSTSVATVALGFKDEDVHNEYDGTGFVISRNSDFSITACTWTNKKWPHTAPKGKTLLRAYVGKAGDESIVEQSDSQIVSIVLEDLKKIMDIKADPELTTVTRWKTSMPQYHVGHQKAISNMRETFKQSYPGVYITGAAFEGVGIPDCIDQGKAAISEAVSYLFS

SEQ ID NO: 718 - protein, 470 aa, Bacillus pumilus
MHDNQKHLVIIGGGITGLAAAFYLEKEVEEKGLPIQISLIEASPRLGGKIQTLYKDGYIIERGPDSFLERKVSGPQLAKDVGLSDQLVNNETGQAYVLVNETLHPMPKGAVMGIPTQISPFITTGLFSVAGKARAAMDFVLPKSKQTEDQSLGEFFRRRVGDEVVENLIEPLLSGIYAGDIDRLSLMSTFPQFYQTEQKHRSLILGMKKSQQHAKAQQVTAKKQGQFQTINQGLQALVEAVESKLKLTTIYKGTKVKQIEKTDGGYGVQLDSGQTLLADSAIVTTPHQSIYSMFPKEAGLEYLHDMTSTSVATVALGFKEEDVHNEYDGTGFVISRNSDFSITACTWTNKKWPHTAPKGKTLLRAYVGKAGDESIVEQSDHQIVSIVLEDLKKIMDIKADPELTTVTRWKTSMPQYHVGHQKAISNMRETFKQSYPGVYITGAAFEGVGIPDCIDQGKAAISEAVSYLFS

SEQ ID NO: 719 - protein, 439 aa, Xanthomonas campestris
QPVIIAGAGIAGLSIAYELQQKGIPYEIMEASSYAGGVVKSLHIDGYELDAGPNSLAASAAFMAYIDQLGLQDQVLEAAAASKNRFLVRNDKLHAVSPHPFKILQSAYISGGAKWRLFTERFRKAAAPEGEETVSSFVTRRFGKEINDYLFEPVLSGIYAGNPDLMSVGEVLPMLPQWEQKYGSVTQGLLKNKGAMGGRKIIAFKGGNATLTNRLQSLLSGKIRFNCAVTGVTRGADDYIVQYTENGNTAMLNASRVIFTTPAYSTAVAIQALDASLATHLSDVPYPRMGVLHLGFGAEARQKAPAGFGFLVPHAAGKHFLGAICNSAIFPSRVPTGKVLFTVFLGGARQEQLFDQLGPEKLQQTVVKELMELLGLTTPPEMQRFSEWNRAIPQLNVGYAQTRQQIGVFEQRYPGIRLAGNYVTGVAVPAIIQAAKGYC

SEQ ID NO: 720 - protein, 445 aa, Chitinophaga pinensis
QPVLIVGAGLSGLSIAYELQKLQVPYQVLEVSGHSGGVMKSLRKDGFELDAGANTIAASPEILAYFTSLGLENEILQATAASKHRFLVRRRQLHAVSPHPFKIMSSPYLSRGSKWRLFTERFRKPVVASGEETVTDFITRRFNREIAEYVFDPVLSGIYAGNPDQMSIAEVLPALPRWEREYGSVTKGLMKDKGAMGGRKIISFKGGNQLLTNRLQQLLTTPVRFNCKVTGITASNGGYIVSAVEDGVSESYTASRVILTTPAYSAAATITNLDAATAALLNEIHYPRMGVLHLGFDATALPQPLDGFGFLVPNAENMHFLGAICNAAIFPDKAPPGKILFTVFLGGARQESLFDQMTPEALQQQVVSEVMSLLHLSAPPVMQHFSSWNKAIPQLNVGHVKLRRAVEAFEKKYPGIHLSGNYLQGVAIPALLQHAAALAASLKKN

SEQ ID NO: 721 - protein, 448 aa, synthetic construct
  REGION 1..448: note = Recombinant
MSDQPVLIVGAGLSGLSIAYELQKLQVPYQVLEVSGHSGGVMKSLRKDGFELDAGANTIATSPEILAYFTSLGLENEILQATATSKHRFLVRRRQLHAVSPHPFKIMSSPYLCRGSKWRLFTERFRKPVVASGEETVTDFITRRFNREIAEYVFDPVLSGIYAGNPDQMSIAEVLPALPRWEREYGSVTKGLMKDKGAMGGRKIISFKGGNQLLTNRLQQLLTTPVRFNCKVTGITASNGGYIVSAVEDGVSESYTASRVILTTPAYSAAATITNLDAATAALLNEIHYPRMGVLHLGFDATALPQPLDGFGFLVPNAENMHFLGAICNAAIFPDKAPPGKILFTVFLGGARQESLFDQMTPEALQQQVVSEVMSLLHLSAPPVMQHFSSWNKAIPQLNVGHVKLRRAVEAFEKKYPGIHLSGNYLQGVAIPALLQHAAALAASLKKN

SEQ ID NO: 722 - protein, 445 aa, synthetic construct
  REGION 1..445: note = Recombinant
QPVLIVGAGLSGLSIAYELQKLQVPYQVLEVSGHSGGVMKSLRKDGFELDAGANTIATSPEILAYFTSLGLENEILQATATSKHRFLVRRRQLHAVSPHPFKIMSSPYLCRGSKWRLFTERFRKPVVASGEETVTDFITRRFNREIAEYVFDPVLSGIYAGNPDQMSIAEVLPALPRWEREYGSVTKGLMKDKGAMGGRKIISFKGGNQLLTNRLQQLLTTPVRFNCKVTGITASNGGYIVSAVEDGVSESYTASRVILTTPAYSAAATITNLDAATAALLNEIHYPRMGVLHLGFDATALPQPLDGFGFLVPNAENMHFLGAICNAAIFPDKAPPGKILFTVFLGGARQESLFDQMTPEALQQQVVSEVMSLLHLSAPPVMQHFSSWNKAIPQLNVGHVKLRRAVEAFEKKYPGIHLSGNYLQGVAIPALLQHAAALAASLKKN

SEQ ID NO: 723 - protein, 445 aa, synthetic construct
  REGION 1..445: note = Recombinant
QPVLIVGAGLSGLSIAYELQKLQVPYQVLEVSGHSGGVMKSLRKDGFELDAGANTIATSPEILAYFTSLGLENEILQATAASKHRFLVRRRQLHAVSPHPFKIMSSPYLSRGSKWRLFTERFRKPVVASGEETVTDFITRRFNREIAEYVFDPVLSGIYAGNPDQMSIAEVLPALPRWEREYGSVTKGLMKDKGAMGGRKIISFKGGNQLLTNRLQQLLTTPVRFNCKVTGITASNGGYIVSAVEDGVSESYTASRVILTTPAYSAAATITNLDAATAALLNEIHYPRMGVLHLGFDATALPQPLDGFGFLVPNAENMHFLGAICNAAIFPDKAPPGKILFTVFLGGARQESLFDQMTPEALQQQVVSEVMSLLHLSAPPVMQHFSSWNKAIPQLNVGHVKLRRAVEAFEKKYPGIHLSGNYLQGVAIPALLQHAAALAASLKKN

SEQ ID NO: 724 - protein, 445 aa, synthetic construct
  REGION 1..445: note = Recombinant
QPVLIVGAGLSGLSIAYELQKLQVPYQVLEVSGHSGGVMKSLRKDGFELDAGANTIATSPEILAYFTSLGLENEILQATATSKHRFLVRRRQLHAVSPHPFKIMSSPYLCRGSKWRLFTERFRKPVVASGEETVTDFITRRFNREIAEYVFDPVLSGIYAGNPDQMSIAEVLPALPRWEREYGSVTKGLMKDKGAMGGRKIISFKGGNQLLTNRLQQLLTTPVRFNCKVTGITASNGGYIVSAVEDGVSESYTASRVILTTPAYSAAATITNLDAATAALLNEIHYPRMGVLHLGFDATALPQPLDGFGFLVPNAENMHFLGAICNAAIFPDKAPPGKILFTVFLGGARQESLFDQMTPEALQQQVVSEVMSLLHLSAPPVMQHFSSWNKAIPQLNVGHVKLRRAVEAFEKKYPGIHLSGNYLQGVAITALLQHAAALAASLKKN

SEQ ID NO: 725 - protein, 445 aa, synthetic construct
  REGION 1..445: note = Recombinant
QPVLIVGAGLSGLSIAYELQKLQVPYQVLEVSGHSGGVMKSLRKDGFELDAGANTIATSPEILAYFTSLGLENEILQATATSKHRFLVRRRQLHAVSPHPFKIMSSPYLCRGSKWRLFTERFRKPVVASGEETVTDFITRRFNREIAEYVFDPVLSGIYAGNPDQMSIAEVLPALPRWEREYGSVTKGLMKDKGAMGGRKIISFKGGNQLLTNRLQQLLTTPVRFNYKVTGITASNGGYIVSAVEDGVSESYTASRVILTTPAYSAAATITNLDAATAALLNEIHYPRMGVLHLGFDATALPQPLDGFGFLVPNAENMHFLGAICNAAIFPDKAPPGKILFTVFLGGARQESLFDQMTPEALQQQVVSEVMSLLHLSAPPVMQHFSSWNKAIPQLNVGHVKLRRAVEAFEKKYPGIHLSGNYLQGVAIPALLQHAAALAASLKKN

SEQ ID NO: 726 - protein, 477 aa, Paenibacillus macerans
MSKKIAVIGGGITGLSVAYYVRKLLREQGVNAGVTLVEQSDRLGGKIRSLRRDGFTIEQGPDSMIARKPAALELIRELGLEDKLAGTNPQAKRSYILHRGKFHPMPPGLMLGIPTQMWPMVKTGLLSPAGKLRAAMDLLLPARRGGGDESLGGFIRRRLGREVLEQMTEPLLAGIYAGDTEQLSLKATFPQFMEMERKHRSLILGLLAGKKQPPRPGGSQVPLPKAAQTSMFLTLTGGLEGLTEALEESLSEEKIITGQAVTGLSQQEAGYELNLSGGERLNADGVILAVPAFAAARLLDGVPEAAYLERIRYVSVANLAFAYRREDVPHDLNGSGVLIPRGEGRMITAITWVSSKWLHSAPGDKALLRAYIGRLGDEAWTAMCRADIERRVAAELRDLLGIAASPLFCELAALPESMPQYPVGHVERLEALRGALCRAKPGLLLCGAGYAGVGIPDCIRQGKEAAESMAAYLRDGR

SEQ ID NO: 727 - protein, 493 aa, Paenibacillus thiaminolyticus
MKALRKLVVIGGGITGLSAAFYALKQADEEGQPISVTIIEQSDRLGGKIQTLRKEGCVIEKGPDSFLARKLPMIDLARDLGMDSELVATNPHAKKTYILRRGKLYRMPPGLVLGIPTELGPFAKTGLISPWGKLRAAMDLFIKPHPADEDESVGAFLDRRLGREVTEHIAEPLLAGIYAGDLQALSLQATFPQFAQVERKHGGLIRGMKASRQAGQSVPGLPDVAKGTMFLTFRNGLTSLVERLEETLRDRAELCLGIGAEGFEKREDGTYLVRLSDGSRLQADAVIVTTPSYHAASLLEEHVDASALQAIRHVSVANVVSVFDRKQVNNQFDGTGFVISRREGRAITACTWTSVKWPHTSRGDKLIIRCYIGRAGDEERVDWPDEALKRTVRSELRELLDIDIDPEFVEITRLRHSMPQYPVGHVQAIRSLRDEVGRTLPGVFLAGQPYEGVGMPDCVRSGRDAAEAAVSAMQAMSTEPEAPAEDAATGTAG

SEQ ID NO: 728 - protein, 474 aa, Paenibacillus polymyxa
MGDKKRRVVVVGGGLTGLSAAFYIRKHYREAGVEPVITLVEKSSSMGGMIETLHRDGFVIEKGPDSFLARKTAMIDLAKELEIDHELVSQNPESKKTYIMQRGKLHPMPAGLVLGIPTELRPFLRSGLVSPAGKLRALMDFVIPPRRTTEDESLGYMIERRLGAEVLENLTEPLLAGIYAGDMRRLSLQATFPQFGEVERDYGSLIRGMMTGRKPAETHTGTKRSAFLNFRQGLQSLVHALVHELQDVDQRLNTAVKSLQRLDGAQTRYRVELGNGEMLEADDVVVTVPTYVASELLKPHVDTAALDAINYVSVANVVLAFEKKEVEHVFDGSGFLVPRKEGRNITACTWTSTKWLHTSPDDKVLLRCYVGRSGDEQNVELPDEALTNLVLKDLRETMGIEAVPIFSEITRLRKSMPQYPVGHLQHIAALREELGSKLPGVYIAGAGYEGVGLPDCIRQAKEMSVQATQELAAD

SEQ ID NO: 729 - protein, 470 aa, Bacillus atrophaeus
MSDGKKHLVIIGGGITGLASAFYMEKEIREKNLPLSVTLVEASPRVGGKIQTARKDGYIIERGPDSFLERKKSAPELVEDLGLEHLLVNNATGQSYVLVNETLHPMPKGAVMGIPTKIAPFMSTGLFSFSGKARAAMDFVLPASKPKEDQSLGEFFRRRVGDEVVENLIEPLLSGIYAGDIDRLSLMSTFPQFYQTEQKHRSLILGMKKTRPQGSGQRLTAKKQGQFQTLKTGLQTLVEELENQLKLTKVYKGTKVTNISRGEKGCSIALDNGMTLDADAAIVTSPHKSAAGMFPDLPAVSQLKDMHSTSVANVALGFPQEAVQMEHEGTGFVISRNSDFSITACTWTNKKWPHSAPEGKTLLRAYVGKAGDESIVELSDNEIIKIVLEDLKKVMKIKGEPEMTCVTRWNESMPQYHVGHKQRIKKVREALAASYPGVYMTGASFEGVGIPDCIDQGKSAVSDVLAYLFG

SEQ ID NO: 730 - protein, 470 aa, Bacillus atrophaeus
MSDGKKHLVIIGGGITGLASAFYMEKEIREKNLPLSVTLVEASPRVGGKIQTARKDGYIIERGPDSFLERKKSAPELVEDLGLEHLLVNNATGQSYVLVNETLHPMPKGAVMGIPTKIAPFMSTRLFSFSGKARAAMDFVLPASKPKEDQSLGEFFRRRVGDEVVENLIEPLLSGIYAGDIDRLSLMSTFPQFYQTEQKHRSLILGMKKTRPQGSGQQLTAKKQGQFQTLKTGLQTLVEELENQLKLTKVYKGTKVTNISRGEKGCSIALDNGMTLDADAAIVTSPHKSAAGMFPDLPAVSQLKDMHSTSVANVALGFPQEAVQMEHEGTGFVISRNSDFSITACTWTNKKWPHSAPEGKTLLRAYVGKAGDESIVELSDNEIIKIVLEDLKKVMKIKGEPEMTCVTRWNESMPQYHVGHKQRIKKVREALAASYPGVYMTGASFEGVGIPDCIDQGKSAVSDVLAYLFE

SEQ ID NO: 731 - protein, 475 aa, synthetic construct
  REGION 1..475: note = Recombinant
KKIAVIGGGITGLSVAYYVRKLLREQGVNAGVTLVEQSDRLGGKIRSLRRDGFTIEQGPDSMIARKPAALELIRELGLEDKLAGTNPQAKRSYILHRGKFHPMPPGLMLGIPTQMWPMVKTGLLSPAGKLRAAMDLLLPARRGGGDESLGGFIRRRLGREVLEQMTEPLLAGIYAGDTEQLSLKATFPQFMEMERKHRSLILGLLAGKKQPPRPGGSQVPLPKAAQTSMFLTLTGGLEGLTEALEESLSEEKIITGQAVTGLSQQEAGYELNLSGGERLNADGVILAVPAFAAARLLDGVPEAAYLERIRYVSVANLAFAYRREDVPHDLNGSGVLIPRGEGRMITAITWVSSKWLHSAPGDKALLRAYIGRLGDEAWTAMCRADIERRVAAELRDLLGIAASPLFCELAALPESMPQYPVGHVERLEALRGALCRAKPGLLLCGAGYAGVGIPDCIRQGKEAAESMAAYLRDGR

SEQ ID NO: 732 - protein, 489 aa, synthetic construct
  REGION 1..489: note = Recombinant
RKLVVIGGGITGLSAAFYALKQADEEGQPISVTIIEQSDRLGGKIQTLRKEGCVIEKGPDSFLARKLPMIDLARDLGMDSELVATNPHAKKTYILRRGKLYRMPPGLVLGIPTELGPFAKTGLISPWGKLRAAMDLFIKPHPADEDESVGAFLDRRLGREVTEHIAEPLLAGIYAGDLQALSLQATFPQFAQVERKHGGLIRGMKASRQAGQSVPGLPDVAKGTMFLTFRNGLTSLVERLEETLRDRAELCLGIGAEGFEKREDGTYLVRLSDGSRLQADAVIVTTPSYHAASLLEEHVDASALQAIRHVSVANVVSVFDRKQVNNQFDGTGFVISRREGRAITACTWTSVKWPHTSRGDKLIIRCYIGRAGDEERVDWPDEALKRTVRSELRELLDIDIDPEFVEITRLRHSMPQYPVGHVQAIRSLRDEVGRTLPGVFLAGQPYEGVGMPDCVRSGRDAAEAAVSAMQAMSTEPEAPAEDAATGTAG

SEQ ID NO: 733 - protein, 469 aa, synthetic construct
  REGION 1..469: note = Recombinant
RRVVVVGGGLTGLSAAFYIRKHYREAGVEPVITLVEKSSSMGGMIETLHRDGFVIEKGPDSFLARKTAMIDLAKELEIDHELVSQNPESKKTYIMQRGKLHPMPAGLVLGIPTELRPFLRSGLVSPAGKLRALMDFVIPPRRTTEDESLGYMIERRLGAEVLENLTEPLLAGIYAGDMRRLSLQATFPQFGEVERDYGSLIRGMMTGRKPAETHTGTKRSAFLNFRQGLQSLVHALVHELQDVDQRLNTAVKSLQRLDGAQTRYRVELGNGEMLEADDVVVTVPTYVASELLKPHVDTAALDAINYVSVANVVLAFEKKEVEHVFDGSGFLVPRKEGRNITACTWTSTKWLHTSPDDKVLLRCYVGRSGDEQNVELPDEALTNLVLKDLRETMGIEAVPIFSEITRLRKSMPQYPVGHLQHIAALREELGSKLPGVYIAGAGYEGVGLPDCIRQAKEMSVQATQELAAD

SEQ ID NO: 734 - protein, 465 aa, synthetic construct
  REGION 1..465: note = Recombinant
KHLVIIGGGITGLASAFYMEKEIREKNLPLSVTLVEASPRVGGKIQTARKDGYIIERGPDSFLERKKSAPELVEDLGLEHLLVNNATGQSYVLVNETLHPMPKGAVMGIPTKIAPFMSTRLFSFSGKARAAMDFVLPASKPKEDQSLGEFFRRRVGDEVVENLIEPLLSGIYAGDIDRLSLMSTFPQFYQTEQKHRSLILGMKKTRPQGSGQQLTAKKQGQFQTLKTGLQTLVEELENQLKLTKVYKGTKVTNISRGEKGCSIALDNGMTLDADAAIVTSPHKSAAGMFPDLPAVSQLKDMHSTSVANVALGFPQEAVQMEHEGTGFVISRNSDFSITACTWTNKKWPHSAPEGKTLLRAYVGKAGDESIVELSDNEIIKIVLEDLKKVMKIKGEPEMTCVTRWNESMPQYHVGHKQRIKKVREALAASYPGVYMTGASFEGVGIPDCIDQGKSAVSDVLAYLFE

SEQ ID NO: 735 - protein, 473 aa, synthetic construct
  REGION 1..473: note = Recombinant
IAVIGGGITGLSVAYYVRKLLREQGVNAGVTLVEQSDRLGGKIRSLRRDGFTIEQGPDSMIARKPAALELIRELGLEDKLAGTNPQAKRSYILHRGKFHPMPPGLMLGIPTQMWPMVKTGLLSPAGKLRAAMDLLLPARRGGGDESLGGFIRRRLGREVLEQMTEPLLAGIYAGDTEQLSLKATFPQFMEMERKHRSLILGLLAGKKQPPRPGGSQVPLPKAAQTSMFLTLTGGLEGLTEALEESLSEEKIITGQAVTGLSQQEAGYELNLSGGERLNADGVILAVPAFAAARLLDGVPEAAYLERIRYVSVANLAFAYRREDVPHDLNGSGVLIPRGEGRMITAITWVSSKWLHSAPGDKALLRAYIGRLGDEAWTAMCRADIERRVAAELRDLLGIAASPLFCELAALPESMPQYPVGHVERLEALRGALCRAKPGLLLCGAGYAGVGIPDCIRQGKEAAESMAAYLRDGR

SEQ ID NO: 736 - protein, 487 aa, synthetic construct
  REGION 1..487: note = Recombinant
LVVIGGGITGLSAAFYALKQADEEGQPISVTIIEQSDRLGGKIQTLRKEGCVIEKGPDSFLARKLPMIDLARDLGMDSELVATNPHAKKTYILRRGKLYRMPPGLVLGIPTELGPFAKTGLISPWGKLRAAMDLFIKPHPADEDESVGAFLDRRLGREVTEHIAEPLLAGIYAGDLQALSLQATFPQFAQVERKHGGLIRGMKASRQAGQSVPGLPDVAKGTMFLTFRNGLTSLVERLEETLRDRAELCLGIGAEGFEKREDGTYLVRLSDGSRLQADAVIVTTPSYHAASLLEEHVDASALQAIRHVSVANVVSVFDRKQVNNQFDGTGFVISRREGRAITACTWTSVKWPHTSRGDKLIIRCYIGRAGDEERVDWPDEALKRTVRSELRELLDIDIDPEFVEITRLRHSMPQYPVGHVQAIRSLRDEVGRTLPGVFLAGQPYEGVGMPDCVRSGRDAAEAAVSAMQAMSTEPEAPAEDAATGTAG

SEQ ID NO: 737 - protein, 467 aa, synthetic construct
  REGION 1..467: note = Recombinant
VVVVGGGLTGLSAAFYIRKHYREAGVEPVITLVEKSSSMGGMIETLHRDGFVIEKGPDSFLARKTAMIDLAKELEIDHELVSQNPESKKTYIMQRGKLHPMPAGLVLGIPTELRPFLRSGLVSPAGKLRALMDFVIPPRRTTEDESLGYMIERRLGAEVLENLTEPLLAGIYAGDMRRLSLQATFPQFGEVERDYGSLIRGMMTGRKPAETHTGTKRSAFLNFRQGLQSLVHALVHELQDVDQRLNTAVKSLQRLDGAQTRYRVELGNGEMLEADDVVVTVPTYVASELLKPHVDTAALDAINYVSVANVVLAFEKKEVEHVFDGSGFLVPRKEGRNITACTWTSTKWLHTSPDDKVLLRCYVGRSGDEQNVELPDEALTNLVLKDLRETMGIEAVPIFSEITRLRKSMPQYPVGHLQHIAALREELGSKLPGVYIAGAGYEGVGLPDCIRQAKEMSVQATQELAAD

SEQ ID NO: 738 - protein, 463 aa, synthetic construct
  REGION 1..463: note = Recombinant
LVIIGGGITGLASAFYMEKEIREKNLPLSVTLVEASPRVGGKIQTARKDGYIIERGPDSFLERKKSAPELVEDLGLEHLLVNNATGQSYVLVNETLHPMPKGAVMGIPTKIAPFMSTRLFSFSGKARAAMDFVLPASKPKEDQSLGEFFRRRVGDEVVENLIEPLLSGIYAGDIDRLSLMSTFPQFYQTEQKHRSLILGMKKTRPQGSGQQLTAKKQGQFQTLKTGLQTLVEELENQLKLTKVYKGTKVTNISRGEKGCSIALDNGMTLDADAAIVTSPHKSAAGMFPDLPAVSQLKDMHSTSVANVALGFPQEAVQMEHEGTGFVISRNSDFSITACTWTNKKWPHSAPEGKTLLRAYVGKAGDESIVELSDNEIIKIVLEDLKKVMKIKGEPEMTCVTRWNESMPQYHVGHKQRIKKVREALAASYPGVYMTGASFEGVGIPDCIDQGKSAVSDVLAYLFE

SEQ ID NO: 739 - DNA, 1329 bp, Xanthomonas campestris
  source 1..1329: mol_type = unassigned DNA
atgcaaacacagcccgttatcattgccggcgccggtattgccggactaagtatagcttacgaattacagcagaaaggcattccctatgaaatcatggaggcctcttcctatgcaggaggcgttgtgaaatcattacatattgatggttatgaactggatgctggccctaattcgctggccgcatctgcagcattcatggcttatatcgatcaactgggtttgcaggaccaggtattggaagctgcggctgccagtaagaaccgctttctggtcagaaatgataaattgcatgcagtatcgccacatccctttaagatactgcagtcagcatatatcagtggtggcgccaagtggcgtctgttcacagaaagatttcgaaaagcggccgctccggagggagaggaaacagtatcttcctttgtgacccgccgttttggaaaggagatcaatgactacctttttgaacccgtgctttctggtatatatgcaggtaatcctgatctgatgtcagttggtgaagtactgcctatgctgccacaatgggagcaaaaatacggtagtgttacgcagggactcctgaagaataaaggagctatgggtggacgtaagatcattgcctttaaaggaggtaatgcgacactgacaaacagattgcaatccctgcttagcggtaagataagatttaactgtgccgtaacgggtgtaacccgtggggcggacgactatattgtacaatataccgagaatggtaatacagctatgctgaatgcatcccgtgtgatattcaccacccctgcatacagtacagccgtagctatacaggcacttgacgcttcccttgctacacatctcagcgatgttccctatccccgtatgggcgtactgcacctggggtttggagcggaagcccggcagaaagcaccggcaggttttggtttcctggtgccgcatgctgcaggaaagcatttcctgggcgctatctgtaacagcgctatattcccttcccgcgtaccgacaggtaaagtgctgtttacggtgttcctgggtggcgcgagacaagaacagctgtttgatcagctggggcctgaaaagctacagcagacagtagtgaaagaactgatggaactgctgggcctgactacaccaccagaaatgcagcgttttagtgaatggaacagagcgattccgcaactaaatgtaggttatgcacagacgaggcagcagataggcgtttttgaacagcgttacccgggcatcagattagcgggtaactatgtgaccggagtggctgtacccgctatcatacaggccgcaaaagggtactgttga

SEQ ID NO: 740 - DNA, 1347 bp, Chitinophaga pinensis
  source 1..1347: mol_type = unassigned DNA
atgtctgatcaacccgtattgattgtcggcgccggcttatccggattgagcattgcgtatgaattgcagaaactgcaggtgccttaccaggtactggaagtttcgggtcatagcggcggcgtgatgaaatcattacggaaagatggatttgaactggatgcaggcgctaatacaatcgcagcttctcctgaaatactggcatacttcacatcactgggactggaaaatgagatattgcaggccaccgctgccagcaagcaccggttcctggtaagacggcggcagttgcacgctgtttctccccatcctttcaagatcatgtcgtctccttacctgagcaggggcagtaaatggcggttgtttaccgaacgttttcgcaaacctgttgtggcaagcggagaagaaaccgtcaccgattttataacaagaaggtttaaccgggagatagcagaatatgtgtttgacccggtattatccggcatatatgccggcaatcccgaccagatgagcatagcggaagtattacctgcgttgccgcgctgggagcgggaatatgggagtgttaccaaagggctgatgaaagataaaggcgcaatgggcggccggaagattatcagttttaaaggtggtaaccagttgctcacaaaccgtttgcagcaattgctcactaccccggtgcgctttaattgtaaggtaaccggtatcaccgcatccaatggcggctatattgtaagcgctgtagaagatggcgtatcagaaagttatactgcttcaagggtgatattaaccacacctgcttacagcgcggcagcaactattacgaatcttgatgctgctaccgctgccttgttaaatgaaattcattatccccgtatgggcgtgctgcacctgggttttgacgctactgcgttgccgcagcccctggatggatttggtttcctggtaccgaatgctgaaaatatgcatttcctgggagcaatctgcaacgctgcaattttcccggataaggcgcctccgggaaaaatcctctttacggtattcctgggaggagcaagacaggaaagtttgtttgaccagatgacgcccgaagctctgcaacagcaggtagtttcagaggtcatgtctttactgcatttatctgcgccgccggtaatgcagcatttcagtagctggaataaagcgattccgcagttaaatgtgggtcatgttaagttacggcgtgccgtggaagcttttgaaaaaaaatatcccggtattcacctcagcgggaattacctgcaaggcgtagctatcccggctttactgcaacatgccgccgctttggcggcttccctgaagaaaaattaa

SEQ ID NO: 741 - DNA, 1413 bp, Bacillus subtilis
  source 1..1413: mol_type = unassigned DNA
atgagtgacggcaaaaaacatgtagtcatcatcggcggcggcattaccggtttagccgccgccttctatatggaaaaagaaatcaaagaaaagaatctgccgcttgaactgacgcttgttgaggcaagtccgagagtcggcggaaaaatccagactgtcaagaaggacggctatatcatcgaaagagggccagactcatttctggaacgaaagaaaagcgccccgcagcttgttaaagacttaggtcttgagcatttgcttgtcaacaatgcgaccggacaatcctatgtgcttgtaaaccgcactctgcatccaatgccgaagggcgctgtaatggggataccgacaaaaattgcgccgtttgtttctacgggtctgttttctttgtctgggaaggcgagagctgctatggatttcatcctgcctgctagcaaaacaaaggatgatcagtcattgggagaattcttccgcagacgtgtcggagatgaagtggtcgagaacttaatcgagccgcttctatcagggatctacgcaggcgacattgacaagctcagcctgatgtcgacattcccgcaattttatcagacggaacaaaagcatagaagcctgattctcggcatgaaaaaaacaaggcctcaaggctcaggccagcagctgacggcaaaaaaacaagggcagttccagactctgtcaaccggtttgcagacccttgtagaagagatcgaaaagcagttaaagctgacgaaggtgtataaaggcacaaaagtgaccaaactcagccatagcggctctggctattcgctcgaactggataacggcgtcacacttgatgctgattcagtaattgtgactgctccgcataaagcggctgcgggaatgctttctgagcttcctgccatttctcatttgaaaaatatgcactccacatccgtggcaaacgtcgctttaggtttccctgaaggctccgtccaaatggagcatgagggcacgggttttgtcatttcaagaaacagtgactttgcgatcacagcctgtacgtggacgaataaaaaatggccgcacgcagcgccggaaggcaaaacgctgcttcgggcatatgtcggaaaagctggagacgaatccattgtcgatctatcagataatgacattatcaacattgtgttagaagacttaaagaaagtcatgaacataaacggcgagccggaaatgacatgtgtcacccgatggcatgaaagcatgccgcagtaccatgtcggccataagcagcgtatcaaggagctgcgtgaagcacttgcatctgcgtatccgggtgtttatatgacaggcgcttctttcgaaggtgtcggcattcccgactgcattgatcaaggaaaagctgccgtgtctgacgcgcttacctatttattcagctaa

SEQ ID NO: 742 - DNA, 1413 bp, Bacillus pumilus
  source 1..1413: mol_type = unassigned DNA
atgcatgacaatcaaaaacaccttgtcatcattggcggtggcatcactggtttagccgccgccttctatttggaaaaggaagtcgaggaaaaaggtcttccgattcaaatatcacttattgaagcgagccctaggctaggtggaaaaatacaaacattatataaagacggctacatcattgaacgtggacctgattcatttttagaaagaaaggtcagtgggccgcagcttgcaaaagatgtcggtctgtccgatcagctcgtcaataatgaaactgggcaagcgtatgtactggtcaatgaaaagcttcacccgatgccaaaaggtgctgttatggggattccaactcaaatcagcccatttattacaactggtcttttttcagttgcgggaaaagcaagagcggcgatggatttcgtgttgccaaaaagcaagcagacggaagaccagtcgcttggtgaattttttagaagacgtgtgggtgatgaggtcgttgagaatttaattgagccgcttctatcaggcatttatgcaggggatattgaccgtctgagcttaatgtcgaccttcccgcaattttatcaaacagaacagcagcatcgaagtttgattcttgggatgaaaaaatcacagcagcatgcgaaagcgcagcaagtgactgcgaaaaaacaaggacagttccaaacgatcaatcaaggattgcagtcgcttgtggaagcagtagaaggtaagctcaagctgacaacggtctataaagggacaaaagtcaaacaaattgaaaaaacggatggaggctatggcttacaattagacagcggtcaaacgctttttgccgattcagccattgtcacgactccgcatcaatcgatttattccatgtttcctaaagaagcagggctagagtatttgcatgacatgacctctacttctgttgcaacagtagcactcggttttaaagatgaggatgttcataatgaatatgacggcactggatttgtcatctcaagaaacagtgatttctctattacggcctgtacatggacaaacaaaaaatggccgcatactgctccgaaaggaaaaacgctattgcgtgcgtatgtagggaaggctggcgacgaatcaattgtcgagcagtcagacagtcaaatcgtcagcattgtgctagaagatttaaagaaaatcatggatattaaagcagatccagaattgacgacagtgactcgctggaagacaagtatgccgcaatatcacgtcggtcatcagaaagccatttcgaacatgcgagaaacgtttaagcaatcatatcctggtgtttatattacaggtgctgcttttgaaggtgtcggaatccctgattgtattgatcaaggaaaagccgccatctcagaggctgtatcgtatctattttcataa

SEQ ID NO: 743 - DNA, 1413 bp, Bacillus pumilus
  source 1..1413: mol_type = unassigned DNA
atgcatgacaatcaaaaacaccttgtcatcattggcggtggcatcactggtttagccgccgccttctatttggaaaaggaagtcgaagaaaaaggtcttcccattcaaatatctcttattgaagcgagccctaggctaggtggaaaaatccaaacattatataaagacggctacatcattgaacgtgggcctgattcatttttagaaagaaaggtcagtggaccgcagctggcgaaagatgtaggtctatccgatcagctcgtcaataatgaaacagggcaggcgtatgtactagtcaatgaaacccttcacccgatgccaaaaggcgctgtcatgggtattccaactcaaatcagcccattcatcacaaccggtcttttttcagttgcaggaaaagcgagagccgcaatggatttcgtcttgccaaaaagcaagcaaacagaagatcagtcgctcggtgaattttttagaagacgtgtcggtgatgaagtagttgagaatttaatcgaacctcttctatcaggcatttatgcaggtgacattgaccgtctcagcttaatgtccaccttcccgcagttttatcaaacagaacaaaagcatcgcagtttgattcttgggatgaaaaaatcacagcagcatgcgaaagcgcagcaagtgacagcgaaaaaacaagggcagttccaaacgatcaatcaaggacttcaagcgcttgttgaagcagtagaaagcaagctcaagctgacaacgatttataaagggacaaaagtgaagcagattgaaaaaacagatgggggctacggtgtgcagttagacagcggtcaaacgcttttggctgattcagccattgtgacaactccgcatcaatcgatctattccatgtttccaaaagaagcggggcttgagtacttgcatgatatgacatctacttctgttgcaacggttgcactcggttttaaagaagaggatgttcataatgaatatgacggtactggttttgtcatctcaagaaacagtgatttctctattacagcttgtacgtggacgaacaaaaaatggccgcatacagctcctaaaggaaaaacattattgcgtgcttatgtagggaaggctggcgacgaatcaattgtcgaacagtcagaccatcaaatcgtcagcattgtactggaggatttgaagaaaattatggatattaaagcagatccagaactgacaacagtgactcgctggaagacgagcatgccgcaatatcacgtcggtcatcaaaaagccatttcgaacatgcgagaaacgtttaagcaatcatatcctggtgtttatatcacaggtgctgcttttgaaggtgtcggaatccctgattgtattgatcaaggaaaagctgccatttcagaggctgtatcttatctattttcataa

SEQ ID NO: 744 - DNA, 1329 bp, synthetic construct
  source 1..1329: mol_type = other DNA
  misc_feature 1..1329: note = Recombinant
atgcaaactcagcccgtcataatagcgggcgctggcattgcgggcctttctatcgcatacgagctgcaacagaagggcattccttacgaaattatggaagcctcgtcctacgccggaggcgtggtcaagtcccttcacattgatggctacgaactagacgccggacctaattcacttgccgcgtccgctgccttcatggcctacatcgaccaactcggactccaagatcaagtgcttgaagccgccgcagcatccaagaaccgcttcctcgtaagaaacgacaagctccatgcagtctcgccgcacccgtttaagatcctccagtcggcctacatcagtggcggcgctaagtggagattgtttaccgaaaggttccgcaaagctgcggctccagagggtgaggagacagtgagcagcttcgtgacgaggaggtttggcaaggagatcaacgactacctgtttgaacccgtcttgtccgggatctacgcgggcaacccggatttgatgagtgttggcgaggttctgccgatgcttcctcaatgggagcagaagtacggcagcgttacacaaggcttgttgaagaataagggcgcaatgggcggccgaaagataatcgctttcaagggcgggaatgccacactgaccaaccgtcttcagtcactgctctcaggaaagatccgcttcaattgcgccgtgacgggtgtcacacgaggcgcagacgactacattgttcagtacactgagaatggcaataccgcaatgttgaatgcaagccgcgtgatcttcacaacacccgcttactcaactgctgttgccatccaggcgttggacgccagcttggccactcacctctctgatgtaccctatcctcgcatgggtgtgttgcacttgggcttcggtgctgaggcaaggcagaaggctcctgcgggctttgggttcttggtcccacacgcagccggaaagcacttcctgggagcaatctgtaactccgctatcttcccttcgcgggtgcccactggcaaggtgttattcaccgtgttcttgggcggtgccagacaggagcaactgtttgaccagctaggccctgagaagttacaacagacagtggtgaaggagcttatggaattgctgggcctaactacgccgccggagatgcaacgattctctgagtggaatcgcgcaataccgcaacttaatgttggctacgcccagactcgtcagcagattggcgtattcgagcagcgctaccctggcatccgcttggccgggaactatgtaactggagtggcggtgcccgccattatccaagctgcaaagggctattgctaa

SEQ ID NO: 745 - DNA, 1347 bp, synthetic construct
  source 1..1347: mol_type = other DNA
  misc_feature 1..1347: note = Recombinant
atgagcgaccagcccgtcctcatcgttggagctggtctctccgggctctcaatcgcttacgaactacagaagctgcaagtcccttaccaagtgctggaggtttctggacattctggtggagtcatgaagtcactccggaaggacggatttgaactcgacgctggtgccaacaccatagccgcgtctcccgagattcttgcgtactttacctcactaggtcttgagaatgagatcctccaggcgactgctgcttctaaacaccgcttcttggtgcggcgaaggcaactgcacgccgtgagcccgcacccgttcaagatcatgtcatcgccgtacctcagccgtggctccaaatggcggctctttactgagcggtttcggaagcccgtcgtcgcttcgggcgaggagaccgtcaccgatttcatcacgaggagattcaaccgcgaaatagcggagtatgtgttcgaccctgttctaagcgggatctacgccgggaacccggaccaaatgagtattgctgaggtgttgcctgccttgcctaggtgggaaagggagtacggatcagtgaccaagggccttatgaaggataagggtgcgatgggaggtcgaaagatcatcagctttaagggtggcaaccagctacttacaaaccgcttacagcagctactcactactccggtgagattcaattgcaaggtgacagggattacagccagcaatggcgggtacatcgtgagcgctgttgaggacggcgtatctgagagctacaccgcatctcgtgtgatcttgaccacacccgcttactcagcagcggctaccataactaaccttgatgcagccactgcggcactgttgaacgaaatccattatccacgtatgggcgtgttacacttgggctttgatgcaactgccttgccacagccgctggacgggttcggatttctagtgccgaacgcggagaacatgcacttcctgggagccatctgcaatgcagccatcttcccggacaaggctccgcccggcaagatcctgtttacagtgttcctcggaggcgcacgccaggagtcgctcttcgatcagatgactcctgaggctcttcagcagcaagtcgttagtgaggtgatgagcttgttgcacttgtcagctccaccggtgatgcagcacttctcctcctggaacaaggccatccctcaattgaacgtcgggcacgtgaagttgcggcgcgcggtagaggcgttcgagaagaaataccctggaatccatctctcgggcaactacctccagggagttgcaataccagctttactccagcacgccgcagctttagctgcttctcttaagaagaactga

SEQ ID NO: 746 - DNA, 1413 bp, synthetic construct
  source 1..1413: mol_type = other DNA
  misc_feature 1..1413: note = Recombinant
atgtcggatggcaagaagcacgtcgtcatcataggcggtgggatcactggcttggccgctgcattctacatggagaaggagattaaggagaagaacctcccacttgagctgacgctagttgaggccagtcccagggtcggcggcaagatccagacggtcaagaaggacgggtacataattgaacgcggccctgacagcttcttagagcgcaagaaatcggctccgcagctagttaaggacttgggacttgagcacctgctcgtcaacaacgcgaccggacagtcgtacgtgctcgtgaaccggacgctccacccgatgccgaagggcgctgtgatgggcattccgaccaagatagcaccattcgtgagtaccggcctattcagcctttccggcaaggcaagggctgcgatggacttcatcttgcctgcctctaagactaaggacgatcagtccttgggcgagttcttccgccgccgggtgggtgatgaggtggtggagaacttaattgagccgctcctatctggaatctacgctggtgacatcgacaaactgtctctgatgtccacctttccgcagttctaccaaactgagcagaagcaccgttcacttatcttgggaatgaagaagactagacctcaaggttcgggtcagcaactgacggccaagaaacagggtcagttccagacgctaagcaccgggcttcagacactcgtggaggagattgagaaacagctcaaacttactaaggtgtacaagggcacgaaggtgacaaagttatcccactccggcagcgggtactccctggagttggacaatggcgtaacgttggacgccgactcagttatcgtgacagcgccgcataaggctgctgccgggatgttgtcagaactcccggcgatttcccatctcaagaacatgcacagtacctcggttgccaacgtcgccctcggattcccggaaggaagtgttcaaatggagcacgaaggcacgggtttcgtaatttccaggaactccgactttgccatcaccgcttgtacttggaccaacaagaagtggcctcatgctgcgccggagggcaagacattgctcagagcttacgtcgggaaggcgggcgacgagtcaatcgtcgatcttagcgacaacgacatcattaacattgtgctggaggacttgaagaaggttatgaacatcaatggcgagccagagatgacctgcgtgacccgatggcacgagtctatgccgcagtaccacgtcggtcacaagcagcgcatcaaggagttgcgcgaggcactcgcctcagcttaccctggcgtgtacatgactggcgcttcgtttgagggcgttggtattcctgactgcatcgaccagggaaaggcggccgtcagtgacgcgctcacctacctcttcagttga

SEQ ID NO: 747 - DNA, 1413 bp, synthetic construct
  source 1..1413: mol_type = other DNA
  misc_feature 1..1413: note = Recombinant
atgcacgacaaccagaagcacctggtcataatcggaggcggcataaccggccttgctgcggccttctacctggagaaggaggtcgaggagaagggtctccctatccagatttcattgattgaggcttcgcctcggctgggagggaagatccagacattgtacaaggacgggtacatcatcgagcgtggtccagacagtttcctggagcggaaggtcagcggaccgcagctcgccaaggacgtgggacttagcgaccaactggtgaacaacgagacaggacaggcgtacgtcttggtgaatgagaagttgcacccgatgcctaagggtgccgtgatgggcatcccaacgcaaatctcacctttcatcaccaccggactcttctccgtggccggaaaggcacgagctgcaatggacttcgttctgcctaagtcgaaacagaccgaagaccagtctctaggcgagttcttccgccgccgtgtgggtgacgaggttgtggagaacctcatcgagcctttgttgtctgggatctacgcgggcgacatcgacagacttagtctcatgagtacctttccgcaattctatcagacagaacagcagcatcgaagtctcatactcgggatgaagaagtcacaacaacatgcaaaggcccagcaagttaccgccaagaaacagggccagttccaaacgatcaaccagggcctccagagcttggtggaggcagtggagggaaagttgaagctcaccaccgtttacaaagggacaaaggttaaacagattgagaagacggacggcggttacgggttacaattggactccggacagactctcttcgctgattccgctatcgtaactactcctcaccagagcatctactctatgttcccgaaggaggcgggcctggagtacctgcacgacatgacttcaacgtctgtcgccaccgtggctttgggcttcaaggacgaggacgtccacaatgagtatgacgggacgggattcgttatcagtaggaactccgacttcagcatcaccgcctgcacgtggaccaacaagaagtggccacacaccgcgcccaaagggaagacccttctgagggcatacgtgggcaaggcgggcgacgagagcatcgtcgagcaatctgattctcagattgtttcaatcgtcctcgaagacctcaagaagatcatggacatcaaggcagacccggaacttaccaccgttactcgatggaagacctcgatgcctcagtatcacgtcgggcaccagaaggcaatcagcaacatgagggagacattcaagcagtcgtatcctggcgtgtacattaccggagcagcattcgaaggcgtaggaatccctgactgcattgaccagggcaaggctgctatctcagaggccgtgtcctatctcttctcgtga

SEQ ID NO: 748 - DNA, 1413 bp, synthetic construct
  source 1..1413: mol_type = other DNA
  misc_feature 1..1413: note = Recombinant
atgcacgacaaccagaagcacctggtgataattggaggcgggattaccggcctagcagccgctttctatctggagaaggaggtggaggagaagggcctcccgatacagatttcgctgattgaagcctctccgcgcctgggcggcaagatccagacattgtacaaggacgggtacatcattgagcgcgggcctgactcgttcctggagcggaaggtctccggtcctcaactggccaaagacgtgggtctttccgatcagcttgtgaacaatgagaccggtcaggcttacgtcttggtcaacgaaactctgcatcccatgcctaagggagccgttatgggcattccaacgcaaatctctccgttcataacgactgggctgttcagcgttgcgggcaaagcaagggctgctatggacttcgtgctgccaaagagtaagcagaccgaggaccagtccctcggcgagttcttccgccgccgagtgggcgatgaggtggttgagaatctaatcgaaccgctgttgtcgggcatctatgcgggcgacatcgacaggctaagtcttatgtccactttccctcagttctaccagacagagcagaaacacaggagtctcatccttggaatgaagaagtcccagcagcacgcgaaggctcagcaagtgaccgccaagaagcaaggacagttccagaccatcaaccagggcctacaggcccttgtcgaagccgttgagtcgaagttaaagttgacgacgatctacaagggcaccaaggtgaagcagattgagaagactgacggtggctatggtgtgcaactcgattcgggccaaacattgctcgctgactccgctatcgtcacgacgccacaccagtcgatctactcgatgttcccgaaggaggcgggcctagagtaccttcacgacatgacctccacttcggtcgccaccgttgcactcggctttaaggaggaggacgttcacaacgagtacgatggcaccggattcgtgatctccaggaactcggacttctcgattaccgcgtgcacgtggacaaataagaagtggccgcacacagcgccaaagggcaagacccttctgcgggcgtatgtgggcaaggccggtgacgagagcattgtcgaacaatctgaccatcagatcgtttctattgttcttgaggatctcaagaagataatggacattaaggccgaccctgagcttaccacagtgacgaggtggaagacctcgatgccgcagtatcacgtagggcaccagaaggccatctccaacatgcgggagacattcaagcagtcgtaccctggcgtgtacattactggcgctgctttcgagggcgttggcatcccggactgcatcgaccagggcaaggccgcaatctcagaggcagtgtcgtacctgttcagctag

SEQ ID NO: 749 - DNA, 1320 bp, synthetic construct
  source 1..1320: mol_type = other DNA
  misc_feature 1..1320: note = Recombinant
cagcccgtcataatagcgggcgctggcattgcgggcctttctatcgcatacgagctgcaacagaagggcattccttacgaaattatggaagcctcgtcctacgccggaggcgtggtcaagtcccttcacattgatggctacgaactagacgccggacctaattcacttgccgcgtccgctgccttcatggcctacatcgaccaactcggactccaagatcaagtgcttgaagccgccgcagcatccaagaaccgcttcctcgtaagaaacgacaagctccatgcagtctcgccgcacccgtttaagatcctccagtcggcctacatcagtggcggcgctaagtggagattgtttaccgaaaggttccgcaaagctgcggctccagagggtgaggagacagtgagcagcttcgtgacgaggaggtttggcaaggagatcaacgactacctgtttgaacccgtcttgtccgggatctacgcgggcaacccggatttgatgagtgttggcgaggttctgccgatgcttcctcaatgggagcagaagtacggcagcgttacacaaggcttgttgaagaataagggcgcaatgggcggccgaaagataatcgctttcaagggcgggaatgccacactgaccaaccgtcttcagtcactgctctcaggaaagatccgcttcaattgcgccgtgacgggtgtcacacgaggcgcagacgactacattgttcagtacactgagaatggcaataccgcaatgttgaatgcaagccgcgtgatcttcacaacacccgcttactcaactgctgttgccatccaggcgttggacgccagcttggccactcacctctctgatgtaccctatcctcgcatgggtgtgttgcacttgggcttcggtgctgaggcaaggcagaaggctcctgcgggctttgggttcttggtcccacacgcagccggaaagcacttcctgggagcaatctgtaactccgctatcttcccttcgcgggtgcccactggcaaggtgttattcaccgtgttcttgggcggtgccagacaggagcaactgtttgaccagctaggccctgagaagttacaacagacagtggtgaaggagcttatggaattgctgggcctaactacgccgccggagatgcaacgattctctgagtggaatcgcgcaataccgcaacttaatgttggctacgcccagactcgtcagcagattggcgtattcgagcagcgctaccctggcatccgcttggccgggaactatgtaactggagtggcggtgcccgccattatccaagctgcaaagggctattgctaa

SEQ ID NO: 750 - DNA, 1338 bp, synthetic construct
  source 1..1338: mol_type = other DNA
  misc_feature 1..1338: note = Recombinant
cagcccgtcctcatcgttggagctggtctctccgggctctcaatcgcttacgaactacagaagctgcaagtcccttaccaagtgctggaggtttctggacattctggtggagtcatgaagtcactccggaaggacggatttgaactcgacgctggtgccaacaccatagccgcgtctcccgagattcttgcgtactttacctcactaggtcttgagaatgagatcctccaggcgactgctgcttctaaacaccgcttcttggtgcggcgaaggcaactgcacgccgtgagcccgcacccgttcaagatcatgtcatcgccgtacctcagccgtggctccaaatggcggctctttactgagcggtttcggaagcccgtcgtcgcttcgggcgaggagaccgtcaccgatttcatcacgaggagattcaaccgcgaaatagcggagtatgtgttcgaccctgttctaagcgggatctacgccgggaacccggaccaaatgagtattgctgaggtgttgcctgccttgcctaggtgggaaagggagtacggatcagtgaccaagggccttatgaaggataagggtgcgatgggaggtcgaaagatcatcagctttaagggtggcaaccagctacttacaaaccgcttacagcagctactcactactccggtgagattcaattgcaaggtgacagggattacagccagcaatggcgggtacatcgtgagcgctgttgaggacggcgtatctgagagctacaccgcatctcgtgtgatcttgaccacacccgcttactcagcagcggctaccataactaaccttgatgcagccactgcggcactgttgaacgaaatccattatccacgtatgggcgtgttacacttgggctttgatgcaactgccttgccacagccgctggacgggttcggatttctagtgccgaacgcggagaacatgcacttcctgggagccatctgcaatgcagccatcttcccggacaaggctccgcccggcaagatcctgtttacagtgttcctcggaggcgcacgccaggagtcgctcttcgatcagatgactcctgaggctcttcagcagcaagtcgttagtgaggtgatgagcttgttgcacttgtcagctccaccggtgatgcagcacttctcctcctggaacaaggccatccctcaattgaacgtcgggcacgtgaagttgcggcgcgcggtagaggcgttcgagaagaaataccctggaatccatctctcgggcaactacctccagggagttgcaataccagctttactccagcacgccgcagctttagctgcttctcttaagaagaactga

SEQ ID NO: 751 - DNA, 1344 bp, synthetic construct
  source 1..1344: mol_type = other DNA
  misc_feature 1..1344: note = Recombinant
atgagcgaccaacccgtcctcatcgttggagctggtctctccgggctctcaatcgcttacgaactacagaagctgcaagtcccttaccaagtgctggaggtttctggacattctggtggagtcatgaagtcactccggaaggacggatttgaactcgacgctggtgccaacaccatagccacgtctcccgagattcttgcgtactttacctcactaggtcttgagaatgagatcctccaggcgactgctacttctaaacaccgcttcttggtgcggcgaaggcaactgcacgccgtgagcccgcacccgttcaagatcatgtcatcgccgtacctctgccgtggctccaaatggaggctctttactgagcggtttcggaaacccgtcgtcgcttcgggcgaggagaccgtcaccgatttcatcacgaggagattcaaccgcgaaatagcggagtatgtgttcgaccctgttctaagtgggatctacgccgggaacccggaccaaatgagtattgctgaggtgttgcctgccttgcctaggtgggaaagggagtacggatcagtgaccaagggccttatgaaggataagggtgcgatgggaggtcgaaagatcatcagctttaagggtggcaaccagctacttacaaaccgcttacagcagctactcactactccggtgagattcaattgcaaggtgacagggattacagccagcaatggcgggtacatcgtgagcgctgttgaggacggcgtatctgagagctacaccgcatctcgtgtgatcttgaccacacccgcttactcagcagcggctaccataactaaccttgatgcagccactgcggcactgttgaacgaaatccattatccacgtatgggcgtgttacacttgggctttgatgcaactgccttgccacagccgctggacgggttcggatttctagtgccgaacgcggagaacatgcacttcctgggagccatctgcaatgcagccatcttcccggacaaggctccgcccggcaagatcctgtttacagtgttcctcggaggcgcacgccaggagtcgctcttcgatcagatgactcctgaggctcttcagcagcaagtcgttagtgaggtgatgagcttgttgcacttgtcagctccaccggtgatgcagcacttctcctcctggaacaaggccatccctcaattgaacgtcgggcacgtgaagttgcggcgcgcggtagaggcgttcgagaagaaataccctggaatccatctctcgggcaactacctccagggagttgcaataccagctttactccagcacgccgcagctttagctgcttctcttaagaagaac

SEQ ID NO: 752 - DNA, 1338 bp, synthetic construct
  source 1..1338: mol_type = other DNA
  misc_feature 1..1338: note = Recombinant
cagcccgtcctcatcgttggagctggtctctccgggctctcaatcgcttacgaactacagaagctgcaagtcccttaccaagtgctggaggtttctggacattctggtggagtcatgaagtcactccggaaggacggatttgaactcgacgctggtgccaacaccatagccacgtctcccgagattcttgcgtactttacctcactaggtcttgagaatgagatcctccaggcgactgctacttctaaacaccgcttcttggtgcggcgaaggcaactgcacgccgtgagcccgcacccgttcaagatcatgtcatcgccgtacctctgccgtggctccaaatggaggctctttactgagcggtttcggaaacccgtcgtcgcttcgggcgaggagaccgtcaccgatttcatcacgaggagattcaaccgcgaaatagcggagtatgtgttcgaccctgttctaagtgggatctacgccgggaacccggaccaaatgagtattgctgaggtgttgcctgccttgcctaggtgggaaagggagtacggatcagtgaccaagggccttatgaaggataagggtgcgatgggaggtcgaaagatcatcagctttaagggtggcaaccagctacttacaaaccgcttacagcagctactcactactccggtgagattcaattgcaaggtgacagggattacagccagcaatggcgggtacatcgtgagcgctgttgaggacggcgtatctgagagctacaccgcatctcgtgtgatcttgaccacacccgcttactcagcagcggctaccataactaaccttgatgcagccactgcggcactgttgaacgaaatccattatccacgtatgggcgtgttacacttgggctttgatgcaactgccttgccacagccgctggacgggttcggatttctagtgccgaacgcggagaacatgcacttcctgggagccatctgcaatgcagccatcttcccggacaaggctccgcccggcaagatcctgtttacagtgttcctcggaggcgcacgccaggagtcgctcttcgatcagatgactcctgaggctcttcagcagcaagtcgttagtgaggtgatgagcttgttgcacttgtcagctccaccggtgatgcagcacttctcctcctggaacaaggccatccctcaattgaacgtcgggcacgtgaagttgcggcgcgcggtagaggcgttcgagaagaaataccctggaatccatctctcgggcaactacctccagggagttgcaataccagctttactccagcacgccgcagctttagctgcttctcttaagaagaactga

SEQ ID NO: 753 - DNA, 1338 bp, synthetic construct
  source 1..1338: mol_type = other DNA
  misc_feature 1..1338: note = Recombinant
cagcccgtcctcatcgttggagctggtctctccgggctctcaatcgcttacgaactacagaagctgcaagtcccttaccaagtgctggaggtttctggacattctggtggagtcatgaagtcactccggaaggacggatttgaactcgacgctggtgccaacaccatagccacgtctcccgagattcttgcgtactttacctcactaggtcttgagaatgagatcctccaggcgactgctgcttctaaacaccgcttcttggtgcggcgaaggcaactgcacgccgtgagcccgcacccgttcaagatcatgtcatcgccgtacctcagccgtggctccaaatggcggctctttactgagcggtttcggaagcccgtcgtcgcttcgggcgaggagaccgtcaccgatttcatcacgaggagattcaaccgcgaaatagcggagtatgtgttcgaccctgttctaagcgggatctacgccgggaacccggaccaaatgagtattgctgaggtgttgcctgccttgcctaggtgggaaagggagtacggatcagtgaccaagggccttatgaaggataagggtgcgatgggaggtcgaaagatcatcagctttaagggtggcaaccagctacttacaaaccgcttacagcagctactcactactccggtgagattcaattgcaaggtgacagggattacagccagcaatggcgggtacatcgtgagcgctgttgaggacggcgtatctgagagctacaccgcatctcgtgtgatcttgaccacacccgcttactcagcagcggctaccataactaaccttgatgcagccactgcggcactgttgaacgaaatccattatccacgtatgggcgtgttacacttgggctttgatgcaactgccttgccacagccgctggacgggttcggatttctagtgccgaacgcggagaacatgcacttcctgggagccatctgcaatgcagccatcttcccggacaaggctccgcccggcaagatcctgtttacagtgttcctcggaggcgcacgccaggagtcgctcttcgatcagatgactcctgaggctcttcagcagcaagtcgttagtgaggtgatgagcttgttgcacttgtcagctccaccggtgatgcagcacttctcctcctggaacaaggccatccctcaattgaacgtcgggcacgtgaagttgcggcgcgcggtagaggcgttcgagaagaaataccctggaatccatctctcgggcaactacctccagggagttgcaataccagctttactccagcacgccgcagctttagctgcttctcttaagaagaactga

SEQ ID NO: 754 - DNA, 1338 bp, synthetic construct
  source 1..1338: mol_type = other DNA
  misc_feature 1..1338: note = Recombinant
cagcccgtcctcatcgttggagctggtctctccgggctctcaatcgcttacgaactacagaagctgcaagtcccttaccaagtgctggaggtttctggacattctggtggagtcatgaagtcactccggaaggacggatttgaactcgacgctggtgccaacaccatagccacgtctcccgagattcttgcgtactttacctcactaggtcttgagaatgagatcctccaggcgactgctacttctaaacaccgcttcttggtgcggcgaaggcaactgcacgccgtgagcccgcacccgttcaagatcatgtcatcgccgtacctctgccgtggctccaaatggaggctctttactgagcggtttcggaaacccgtcgtcgcttcgggcgaggagaccgtcaccgatttcatcacgaggagattcaaccgcgaaatagcggagtatgtgttcgaccctgttctaagtgggatctacgccgggaacccggaccaaatgagtattgctgaggtgttgcctgccttgcctaggtgggaaagggagtacggatcagtgaccaagggccttatgaaggataagggtgcgatgggaggtcgaaagatcatcagctttaagggtggcaaccagctacttacaaaccgcttacagcagctactcactactccggtgagattcaattgcaaggtgacagggattacagccagcaatggcgggtacatcgtgagcgctgttgaggacggcgtatctgagagctacaccgcatctcgtgtgatcttgaccacacccgcttactcagcagcggctaccataactaaccttgatgcagccactgcggcactgttgaacgaaatccattatccacgtatgggcgtattacacttgggctttgatgcaactgccttgccacagccgctggacgggttcggatttctagtgccgaacgcggagaacatgcacttcctgggagccatctgcaatgcagccatcttcccggacaaggctccgcccggcaagatcctgtttacagtgttcctcggaggcgcacgccaggagtcgctcttcgatcagatgactcctgaggctcttcagcagcaagtcgttagtgaggtgatgagcttgttgcacttgtcagctccaccggtgatgcagcacttctcctcctggaacaaggccatccctcaattgaacgtcgggcacgtgaagttgcggcgcgcggtagaggcgttcgagaagaaataccctggaatccatctctcgggcaactacctccagggagttgcaataacagctttactccagcacgccgcagctttagctgcttctcttaagaagaactga

SEQ ID NO: 755 - DNA, 1338 bp, synthetic construct
  source 1..1338: mol_type = other DNA
  misc_feature 1..1338: note = Recombinant
cagcccgtcctcatcgttggagctggtctctccgggctctcaatcgcttacgaactacagaagctgcaagtcccttaccaagtgctggaggtttctggacattctggtggagtcatgaagtcactccggaaggacggatttgaactcgacgctggtgccaacaccatagccacgtctcccgagattcttgcgtactttacctcactaggtcttgagaatgagatcctccaggcgactgctacttctaaacaccgcttcttggtgcggcgaaggcaactgcacgccgtgagcccgcacccgttcaagatcatgtcatcgccgtacctctgccgtggctccaaatggaggctctttactgagcggtttcggaaacccgtcgtcgcttcgggcgaggagaccgtcaccgatttcatcacgaggagattcaaccgcgaaatagcggagtatgtgttcgaccctgttctaagtgggatctacgccgggaacccggaccaaatgagtattgctgaggtgttgcctgccttgcctaggtgggaaagggagtacggatcagtgaccaagggccttatgaaggataagggtgcgatgggaggtcgaaagatcatcagctttaagggtggcaaccagctacttacaaaccgcttacagcagctactcactactccggtgagattcaattacaaggtgacagggattacagccagcaatggcgggtacatcgtgagcgctgttgaggacggcgtatctgagagctacaccgcatctcgtgtgatcttgaccacacccgcttactcagcagcggctaccataactaaccttgatgcagccactgcggcactgttgaacgaaatccattatccacgtatgggcgtgttacacttgggctttgatgcaactgccttgccacagccgctggacgggttcggatttctagtgccgaacgcggagaacatgcacttcctgggagccatctgcaatgcagccatcttcccggacaaggctccgcccggcaagatcctgtttacagtgttcctcggaggcgcacgccaggagtcgctcttcgatcagatgactcctgaggctcttcagcagcaagtcgttagtgaggtgatgagcttgttgcacttgtcagctccaccggtgatgcagcacttctcctcctggaacaaggccatccctcaattgaacgtcgggcacgtgaagttgcggcgcgcggtagaggcgttcgagaagaaataccctggaatccatctctcgggcaactacctccagggagttgcaataccagctttactccagcacgccgcagctttagctgcttctcttaagaagaactga

SEQ ID NO: 756 - DNA, 1338 bp, synthetic construct; identical to SEQ ID NO: 752
  source 1..1338: mol_type = other DNA
  misc_feature 1..1338: note = Recombinant

SEQ ID NO: 757 - DNA, 1338 bp, synthetic construct; identical to SEQ ID NO: 752
  source 1..1338: mol_type = other DNA
  misc_feature 1..1338: note = Recombinant

SEQ ID NO: 758 - DNA, 1338 bp, synthetic construct; identical to SEQ ID NO: 752
  source 1..1338: mol_type = other DNA
  misc_feature 1..1338: note = Recombinant

SEQ ID NO: 759 - DNA, 1338 bp, synthetic construct; identical to SEQ ID NO: 752
  source 1..1338: mol_type = other DNA
  misc_feature 1..1338: note = Recombinant

SEQ ID NO: 760 - DNA, 1329 bp, synthetic construct
  source 1..1329: mol_type = other DNA
  misc_feature 1..1329: note = Recombinant
atgcaaacgcaaccagtgataatcgcgggcgctggcatcgccggactttccattgcgtacgagctccagcagaagggtatcccgtacgagatcatggaggcaagttcctatgccggcggcgtcgtcaagtcactgcacatcgacgggtacgagctggacgcgggacccaacagcctagccgcttccgctgccttcatggcgtacatcgaccagctggggctccaagaccaagtcctcgaggctgccgcggcgagtaaaaatcgctttctcgtgaggaacgacaagcttcacgctgtgtcaccgcaccctttcaaaatacttcaaagcgcctacatctcgggcggtgctaagtggcggttattcacggagcgttttaggaaggccgccgctcccgaaggtgaggagactgtttcctctttcgtcacacgcaggttcggaaaggagatcaacgattatctctttgagcctgttctcagcggaatatacgccggcaacccagaccttatgagcgtcggagaggttctccctatgctgccgcaatgggagcaaaagtatggttctgtgacccaaggcctactgaagaataagggggcgatgggcggaagaaagataattgcattcaaggggggtaatgccacccttacaaatcgcctgcaaagccttttgtcgggaaaaatccgtttcaattgtgccgtcaccggtgttacaagaggcgcagatgattacatcgttcagtacaccgagaacggtaataccgccatgctaaacgcatctagggtgattttcacaaccccggcctactcaactgccgtcgccatccaagccctcgacgccagcctggccactcatctcagtgatgtgccttaccctcgtatgggggtattacatcttggcttcggggccgaagcgcgacagaaagcccccgctggatttggcttcctagtccctcacgccgccggtaaacattttcttggcgccatctgtaactccgcaatcttcccatccagagtgcctactggcaaggttctgtttactgtgttcctgggcggtgcccgccaggagcagctattcgaccaattaggcccagaaaagctccaacaaaccgttgtgaaggaactaatggagttgctcggactgacgacaccacccgagatgcagaggttttctgagtggaaccgcgcgattccacaactcaacgtcgggtacgcccagacccggcaacagataggggttttcgagcagcgctatccaggcattcgacttgctggtaattacgtcacaggagtcgctgtgccagccataatacaagctgcaaaggggtattgctga

SEQ ID NO: 761 - DNA, 1347 bp, synthetic construct
  source 1..1347: mol_type = other DNA
  misc_feature 1..1347: note = Recombinant
atgtcagaccaaccagtcttgattgttggggccggcctctctggcctgtcgattgcctacgaactgcagaagctccaggtgccgtaccaagtcctggaggtgtcgggccatagcggcggtgtcatgaaatcgctgcgtaaggacggcttcgagttggacgcgggcgcgaacacaatcgcggctagcccagaaatacttgcttactttacaagtctgggtctggagaatgagatcctccaggctacagccgctagcaaacatcgattcctggtgcgcaggcgacaactgcacgccgtcagtccacatccattcaagataatgtcgagcccctatttaagccgcgggtccaagtggaggctctttactgaaagatttcgaaaaccggtcgtcgctagcggagaagaaactgttacagattttattactcgcaggttcaacagggagattgcagaatatgtcttcgatccagttctctcaggaatttacgcgggcaacccagaccagatgagcatcgctgaagtcctgcccgcgctccctcggtgggaacgagaatatggaagcgtcaccaaaggtctcatgaaggacaagggggccatgggcggtcggaagatcatatcgtttaaaggcgggaaccagcttctgactaaccggctgcaacagctgctcactacaccagtgcggtttaattgcaaagtcacaggtataacggctagtaatggcggctacattgtttcagcggtcgaagatggtgtgagcgagtcatacaccgcctcccgcgtgatccttaccacaccggcctactcggcggcagctacaatcaccaatcttgacgcggctacagccgcattactcaacgagattcattatcccaggatgggggtcctccatctgggcttcgacgcgacagctcttccccagcccttggatggcttcgggtttctggtcccgaacgccgaaaacatgcattttctcggcgccatttgcaacgccgcgatcttcccggataaggccccgcctggaaaaatattgttcactgtctttcttggcggcgcacgccaggagtccctgttcgaccaaatgaccccagaggctctgcagcagcaggtggtctctgaggtgatgtcacttctgcacctttctgcacctccagtgatgcagcacttctcaagctggaataaagctatcccccagttgaacgtcggccacgtgaagcttcgtagggcggtcgaagcgttcgaaaagaagtatccaggcattcacctgtccggcaactatctgcagggcgtcgcaatcccggcgctactccagcacgccgctgcgctagccgcgtctcttaagaagaattag

SEQ ID NO: 762 - DNA, 1413 bp, synthetic construct
  source 1..1413: mol_type = other DNA
  misc_feature 1..1413: note = Recombinant
atgagtgacgggaagaagcacgttgtgataatcggaggcgggataaccggcctcgccgccgccttctatatggagaaggaaattaaggagaaaaacctcccgctagagctgacgttggtggaagcgtcaccaagggtcggcggtaagatccagaccgtcaaaaaggatggctacatcatcgagcgcggcccggacagcttcctcgagcggaagaagtccgcaccccagttagtcaaagacctcggcttggaacaccttttggtcaacaacgcgacaggtcagtcctatgtgcttgtgaatcggacgctgcacccgatgcctaagggcgctgtcatgggtatccccacgaagatcgcgccgttcgtatcgaccggcctgttctccctatcaggtaaggcccgcgctgccatggactttatcctccctgcctcgaaaactaaagacgatcagtcactaggcgagttctttcggcggcgagtgggtgacgaggtggtggagaacctcatagaacccctgctgtccgggatctacgctggagacatcgacaagctgagcctcatgtctacttttccgcaattttatcagaccgagcagaaacacagatctcttatccttggcatgaagaagaccaggcctcaggggtcgggtcaacagctcacagcaaagaagcaagggcagttccaaaccctgagcacaggcttgcagaccctggtcgaagaaattgagaagcagctgaaattaacgaaggtttacaagggaaccaaggtcaccaaacttagtcacagcggctcgggctacagcctagagcttgacaacggagtgactctggacgcagacagcgtgatcgtgacggcgccccacaaggctgcggcgggaatgctgagtgagctccccgccataagtcatctcaagaacatgcactcgacgtcggtagccaatgtcgcgttggggtttcccgagggtagcgtccaaatggaacacgaaggaactggtttcgtcatatcccggaactctgacttcgcgatcacagcgtgcacttggacgaataaaaagtggccgcacgcagcgcctgaggggaagacccttcttcgagcgtatgtgggcaaagcgggcgatgaaagcattgtggatttatcggacaacgacattatcaacatcgtactggaagacctaaagaaagtcatgaacataaacggcgaaccggagatgacatgcgtcactaggtggcacgagagcatgccgcagtaccacgtggggcacaagcagcgcatcaaggaattgagggaggccctcgctagcgcgtaccctggagtttacatgaccggcgccagttttgagggtgtcggtatccctgactgtatcgaccagggtaaggccgcggtaagcgacgcattgacgtacctgttctcatga

SEQ ID NO: 763 - DNA, 1413 bp, synthetic construct
  source 1..1413: mol_type = other DNA
  misc_feature 1..1413: note = Recombinant
atgcacgacaaccagaagcatctggtcatcattggcgggggcatcacgggcttggcagccgccttctacctggagaaggaggtcgaggagaagggccttccgattcaaatatctctgattgaggcgtctccccgactcggcgggaagatccagaccctctataaagacggctatataattgagcggggaccagattctttcctggagcgaaaggtctcgggcccacagttggcgaaagatgtcggcctctccgatcaactcgtgaacaacgagaccgggcaggcctatgttctggtgaacgagaaattgcatcctatgcctaagggggccgtcatgggaataccaacccaaatatctcccttcataacaaccggactgttctcggttgccggtaaggccagggccgcgatggacttcgtcctgccaaagtctaagcagacggaggaccagtccctcggggaatttttccgccgccgggtcggcgacgaggttgtggaaaacctgattgagccgttgctgtctggcatctacgcaggcgatatcgacaggctgagccttatgtctacgttcccgcaattttatcagaccgagcagcagcaccggtctctgatacttggcatgaagaaatcacaacagcacgccaaagcacaacaggttactgctaagaagcaaggacaattccagacaatcaaccaagggttgcagtccctcgtggaggcggtagaaggcaaattgaaactcaccaccgtctacaagggcacgaaagttaagcagatcgagaaaacggatggcgggtacggtctccagctcgatagcggccagacactgttcgccgactcagcgatcgtcaccaccccccaccagtccatctacagcatgttccctaaggaggcggggttagaatacttacatgacatgacctccacctccgtcgccacagtagctctcggcttcaaggacgaggacgtgcacaacgaatacgacggtaccgggttcgtgatctcgcggaattcggacttcagtattactgcctgcacctggacgaacaagaagtggccacacacagcacccaaaggtaagaccttgctgagggcttatgtgggtaaggcgggggacgagagcatagtggagcagtctgactcgcagatcgtcagcatcgtactggaagacctgaagaagatcatggacatcaaggccgacccggagttgaccaccgtcacacggtggaaaacctcaatgccacaatatcatgtcggacatcagaaggccatctccaacatgcgcgagaccttcaagcagtcttacccgggcgtgtatatcaccggagcggctttcgagggggtcggcatccctgactgcatagaccaggggaaggcggccatcagcgaggctgtgtcgtaccttttctcgtga

SEQ ID NO: 764 - DNA, 1413 bp, synthetic construct
  source 1..1413: mol_type = other DNA
  misc_feature 1..1413: note = Recombinant
atgcatgacaaccagaagcacctggttatcattggcggtggcataaccgggctcgccgccgccttttacctggagaaggaggtggaggaaaaaggcctcccaatccagatcagtttgatagaggcgagtccgcgcttggggggcaagatccagactctgtataaagatggatacattatcgagaggggtccagacagcttcctggagcgcaaggtctccgggcctcagttggcgaaggatgttgggttgtcagatcagctcgtgaacaacgaaacgggccaggcgtatgtgttagtcaatgaaactctgcaccccatgcccaagggcgcggtgatggggatacccacccagatcagtcccttcatcacaaccggtctgttctcggtcgcagggaaggcccgagcggcgatggattttgtcctgcccaagtcgaagcagaccgaggaccagagcctcggggagtttttcaggcgcagagttggcgatgaggtcgtcgagaacctcattgagccgcttctcagcgggatttatgcgggagacatcgacaggctctccctgatgtcaacttttccgcagttctaccagacggagcaaaagcacaggagcctgattctgggaatgaagaagtcacaacaacatgctaaagcccagcaggtaactgcaaagaagcagggtcagttccaaacaatcaatcaaggtctccaggcactcgtcgaggccgtggagtcaaagctaaagctgaccaccatatacaagggtaccaaagtgaaacaaatcgagaagacagacggcggttacggagtgcagcttgactccggccagaccctcctcgccgactctgcgatcgtgaccacgccgcaccagtccatctactctatgttccccaaggaggccgggctcgaatatttgcacgatatgaccagcaccagcgtcgctacggtagcactcgggttcaaggaggaggacgtccacaacgagtacgatggcactggcttcgtgatcagccgtaactctgatttcagcatcactgcatgcacatggactaataagaaatggccccacactgcacccaagggcaagacgctgctgcgagcctacgtcgggaaggccggggacgagtctattgtagagcagagcgatcaccagattgtgagtatcgtactggaggacctgaaaaagatcatggatataaaggcggacccagagctgactaccgtgacccgctggaaaacatccatgccgcaataccatgtgggccaccaaaaagcgatctccaacatgcgggagacgttcaagcaatcttatcccggcgtgtacatcacgggagccgcgttcgagggcgtgggcatcccggattgcatcgatcagggtaaggctgcgatatcggaggctgtcagttacctgttttcttag

SEQ ID NO: 765 - DNA, 1434 bp, Paenibacillus macerans
  source 1..1434: mol_type = unassigned DNA
gtgagcaaaaaaatcgccgtcatcggcggaggcataaccgggttaagcgtggcttattacgtgcgtaaattgctgcgtgaacagggggtaaacgctggggttaccctcgtggaacagtccgatcggctgggcggcaaaatccgttccctacgacgtgacggctttacgatagaacagggcccggattcaatgatcgcgcgcaagcccgccgcgctggaattgatccgggaactcgggctggaggataagctggcgggaacgaatccgcaggcgaagcgaagttatatattgcatcgcggcaaattccatcccatgccgccggggctgatgctcggcataccgacgcaaatgtggccgatggtcaagacggggctgctctctccggccggcaagctgcgggccgcgatggatctgctgcttcccgcgcggcgcggcggcggcgacgaatcgctcggcggcttcatccgccgccggctcggcagagaagtgctggagcagatgacggagccgcttctagccggcatatatgccggggacaccgaacagcttagcttgaaagcgacgtttccgcagtttatggagatggagcgcaagcaccgcagcctgatccttgggctgctggccggcaaaaagcagccgccgcggccggggggaagccaggtcccgctgccgaaggccgcgcaaaccagcatgtttctgacgttgacgggcggtttggagggactgacggaagcgctggaggaatcgctaagcgaagagaaaataattaccggccaggcggtaaccggactgtcgcagcaagaggcgggttatgagcttaacttaagcgggggcgagcgtttgaacgcggacggagtcattttggcagttcctgcttttgctgcggcccggctattggatggcgttcccgaagccgcttacctggagcggatccgttatgtgtccgtggccaatttagccttcgcctaccggcgggaagacgttccgcacgatttgaacggctccggcgtgcttatcccgcgcggggaggggcgaatgattacggccattacctgggtttcttcgaaatggctgcattcggctcccggcgataaagcgctgctgcgagcctatatcggccgcctgggcgacgaggcatggaccgcgatgtgcagggccgacatcgagcgccgggtggccgccgagctgcgcgatttgctgggcatcgccgccagcccgctgttttgcgagctcgccgctttgccggagtcgatgccccaatatccggtcgggcatgtcgagcggcttgaggcgctgcgcggggcattgtgccgggcgaagccggggctgctgctgtgcggcgcgggatatgccggcgtaggcattcccgactgcatccggcagggcaaggaagccgctgaaagcatggcggcttatttgagggatggacggtga

SEQ ID NO: 766 - DNA, 1482 bp, Paenibacillus thiaminolyticus
  source 1..1482: mol_type = unassigned DNA
atgaaagctctgcggaaacttgtcgttatcggtggcggaattacgggattgagcgcggcgttctatgcgctgaagcaggcggatgaagaggggcagcccatctccgttaccatcatagagcaatcggaccgtctcggcgggaagatacagaccctgcggaaggaagggtgtgtcattgagaaaggcccggactccttcctcgcccggaagctgccgatgatcgatttggcgcgcgacctcggaatggattctgaattggtcgccacgaatccgcatgccaaaaaaacatatatattgcgccggggcaagctgtaccggatgccgcccggcctcgtgctgggcatcccgacggagctggggccgttcgcgaagacagggctcatctccccgtgggggaagctgcgcgcggctatggatctgttcatcaagccgcatccggcggatgaagatgaatccgttggcgcgttcctggacagacggctcggacgcgaagtgacggagcatattgccgagccgctgcttgccggcatttatgccggagatttgcaggcgctgagcctgcaggccaccttcccgcagttcgcgcaggtggagcggaagcacggtggcctgatacgcggaatgaaggcgagccgccaagcaggccaatcggtaccggggctgccggatgtcgccaaaggaacgatgttcctgacattccgcaacggcttgacctcgctcgtcgaacggctggaggagacgctgcgggaccgggccgaattgtgccttggcatcggcgcggaaggattcgagaagcgggaggacggaacgtatctggtgcgcttgagcgatgggagcaggctgcaggcggatgccgtcatcgtgacgacgccttcgtatcatgcggcatccttgctcgaggagcatgtcgatgcgagcgccttgcaggcgatccgtcatgtatccgtcgcgaatgtcgtcagcgtgttcgatcgcaagcaggtcaataatcagttcgacggcacagggttcgtcatctcgcgccgggaaggccgggcgattacggcctgcacgtggacctcggtgaagtggccgcatacgagccgcggggacaagcttattatccgctgctacattggccgggccggtgacgaggaacgggtggactggccggacgaggcgctcaagcggacggtgcgcagcgagctgcgggagctgcttgatatcgatatcgacccggagttcgtcgagattacgcgccttcgccactcgatgccccagtatccggtcggccatgtgcaggcgatccgctcgctgagggacgaggtggggcgcacgctcccaggcgtgttcctggcaggacagccgtacgaaggggtcggcatgcccgattgcgttcgcagcggccgcgatgcggcggaagccgcggttagcgcgatgcaggccatgagtacggagccagaggcgccagccgaggatgccgctactggaacggcggggtaa

SEQ ID NO: 767 - DNA, 1425 bp, Paenibacillus polymyxa
  source 1..1425: mol_type = unassigned DNA
atgggtgataagaaacgccgtgttgttgttgtcggcggtggccttaccggcctcagcgcggcattttatatccgcaagcattaccgggaagcaggagttgaacctgtgattactttggtcgagaaaagctcgtccatgggaggcatgattgagacactgcaccgggatggatttgtgattgaaaaagggcccgattcgttcctggctcgcaaaacggcaatgattgatctggccaaagaattggagatcgatcatgagctggtaagtcagaatccggagtcgaagaaaacgtatatcatgcagcgtggcaagcttcatcctatgccagcaggacttgttctcggtattccgacagaactaagaccattcttgagaagtggtttggtttctccggcaggcaaactgcgggcgttgatggattttgtcatcccgccgcgtcgtacaacagaggatgaatcgctcggttatatgattgaacgccgtcttggagcagaagtgctggagaacttgacggaaccactgctcgcaggaatctatgcaggtgatatgcggcgattgagcctccaggctaccttcccgcagttcggagaagtagagcgcgattacggcagcttgatccggggcatgatgacggggcgcaaaccggctgagacgcataccggaacaaaacggagcgcttttttgaactttcgccagggacttcagagccttgttcatgcactcgtccatgagttgcaggatgtggatcaacgtctgaacactgcggtgaaatcgctgcaacgccttgatggagcgcagaccagataccgtgttgaacttggtaatggcgaaatgcttgaagccgatgatgtagtggttactgtgccgacatatgtcgcgtcggagctgttgaagcctcacgtggacacagcggcactggatgcgattaactatgtgtctgtagccaatgtagtgctcgcttttgagaaaaaagaggtggagcatgtattcgacggatcgggtttcctcgttccgcggaaagagggtcggaatattacggcttgcacgtggacatcgacgaaatggctgcataccagcccggatgataaagtactgcttcgctgttatgttggtcgctccggtgacgaacagaacgtagagcttccggatgaagcgctgacgaatctcgttctcaaagatctgagagagacgatgggtattgaagcagtgccgatcttctccgagattacaaggcttcgtaaatccatgccacagtatccggtgggacaccttcaacatattgccgctctccgtgaggagcttggcagcaaattaccgggtgtgtacattgcaggtgcaggttatgagggcgtaggcttgcctgattgcatcagacaagcgaaggaaatgtctgttcaggctacacaagagcttgcagcagattaa

SEQ ID NO: 768 - DNA, 1413 bp, Bacillus atrophaeus
  source 1..1413: mol_type = unassigned DNA
atgagtgacggcaaaaagcatcttgtcatcatcggcggcggcatcacgggattggcctccgccttctatatggaaaaagaaatcagagagaaaaatttgcctctttctgtgacgttagtcgaagcaagcccgagagttggcgggaaaattcaaacggcccgcaaggacggttatattattgaaagagggccggactcatttttagaaagaaaaaaaagcgcaccggagcttgtcgaagatttaggccttgagcatttgcttgtcaacaatgcgacggggcagtcttatgtgctggttaacgaaacgcttcacccgatgccaaagggcgctgttatgggcatacctactaaaatagcgccatttatgtctaccggcttattttcattttccggcaaagcgcgcgcggctatggatttcgttttgcccgcaagcaagccgaaggaagatcagtccctgggtgaattcttccgcaggcgtgtcggtgacgaagttgttgaaaatttgattgagccgctattatccggcatttatgcgggtgacattgacaggctcagcctgatgtcgacgttcccgcagttttatcagaccgaacaaaagcacagaagcttgatcctcggcatgaaaaaaacaaggcctcagggctccggacagcggttaacggctaaaaaacaagggcaattccaaaccttaaagaccggcttgcagacactcgtcgaagagctggaaaaccagctgaagctgacgaaggtatacaagggtacaaaagtaaccaatatcagccgcggggaaaagggctgctccatcgctcttgataacgggatgacgctggatgccgatgcagcgattgtaacctcaccgcacaaatcggctgccggaatgtttccggatctgccagctgtcagtcagttaaaagacatgcactctacctctgtggcgaatgtcgcgcttggctttccacaagaggctgtccaaatggaacatgaaggaacgggttttgtcatctcaagaaacagtgatttttcaataacggcctgtacttggacgaataaaaaatggccgcactctgctccggaaggcaaaacgctcctcagggcttatgtcggaaaagcgggtgatgaatcaatcgtcgaactgtctgataatgagattatcaaaattgtattagaagacctaaagaaagtcatgaaaatcaaaggcgaacctgaaatgacgtgcgtcacacgctggaatgagagtatgccccaatatcatgtcggccacaaacagcgtataaaaaaagtgcgcgaagcactggctgcttcctatccgggagtttacatgacgggcgcttcattcgaaggcgttgggattccggactgtatcgatcaagggaaaagcgccgtttcagacgtacttgcttatttattcggttga

SEQ ID NO: 769 - DNA, 1413 bp, Bacillus atrophaeus
  source 1..1413: mol_type = unassigned DNA
atgagtgacggcaaaaagcatcttgtcatcatcggcggcggcatcacgggattggcctccgccttctatatggaaaaagaaatcagagagaaaaatttgcctctttctgtgacgttagtcgaagcaagcccgagagttggcgggaaaattcaaacggcccgcaaggacggttatattattgaaagagggccggactcatttttagaaagaaaaaaaagcgcaccggagcttgtcgaagatttaggacttgagcatttgcttgtcaacaatgcgacggggcagtcttatgtgctggttaacgaaacgcttcacccgatgccaaagggcgctgttatgggcatacctactaaaatagcgccatttatgtctacccgcttattttcattttccggcaaagcgcgcgcggctatggatttcgttttgcccgcaagcaagccgaaggaagatcagtccctgggtgaattcttccgcaggcgtgtcggtgacgaagttgttgaaaatttgattgagccgctattatccggcatttatgcgggtgacattgacagactcagcctgatgtcgacgttcccgcagttttatcagaccgaacaaaagcacagaagcttgatcctcggcatgaaaaaaacaaggcctcagggctccggacagcagttaacggctaaaaaacaagggcaattccaaaccttaaagaccggcttgcagacactcgtcgaagagctggaaaaccagctgaaactgacgaaggtatacaagggtacaaaagtaaccaatatcagccgcggggaaaagggctgctccatcgctcttgataacgggatgacgctggatgccgatgccgcgattgtgacctcaccgcacaaatcggctgccggaatgtttccggatctgccagctgtcagccagttaaaagacatgcactctacctctgtggcgaatgtcgcgcttggctttccacaagaggctgtccaaatggaacatgaaggaacgggttttgtcatctcaagaaacagtgatttttcaataacggcctgtacttggacgaataaaaaatggccgcactctgctccggaaggcaaaacgctcctcagggcttatgtcggaaaagcgggtgatgaatcaatcgtcgaactgtctgataatgagattatcaaaattgtattagaagacctaaagaaagtcatgaaaatcaaaggcgaacctgaaatgacgtgcgtcacacgctggaatgagagtatgccccaatatcatgtcggccacaaacagcgtataaaaaaagtgcgcgaagcactggctgcttcctatccgggagtttacatgacgggcgcttcattcgaaggcgttgggattccggactgtatcgaccaagggaaaagcgccgtttcagacgtacttgcttatttattcgaatga

SEQ ID NO: 770 - DNA, 1434 bp, synthetic construct
  source 1..1434: mol_type = other DNA
  misc_feature 1..1434: note = Recombinant
atgtcaaagaagattgcagtcattggtggtgggataacagggttgtccgtggcctactacgtgaggaagctgcttcgggagcaaggcgttaatgcgggcgttaccctcgtcgagcaatccgaccgcctcggcgggaagattagatccttgagacgagacggctttaccattgagcaaggccctgactctatgattgcacgtaagcccgcagctctcgaacttatccgtgagcttggtctggaggacaagttggcgggcacaaaccctcaagccaaacgctcctacatactgcaccgtggcaagtttcatccgatgccacctgggctgatgctcgggattcccactcaaatgtggccaatggtcaagaccgggctgctatctccggccggaaagctacgggctgcgatggacctacttcttcctgcaaggcgcggaggcggcgacgaatcacttggtgggtttatccggaggcggcttggacgtgaggtgttggagcagatgaccgaaccactccttgctggaatctatgctggcgacacagaacagctttcacttaaagcgacctttcctcaattcatggagatggaaaggaaacatcgcagtctcatccttggactattggctgggaagaaacagccaccgcgtcccggtggtagccaagtgccgctcccaaaggccgctcagaccagtatgttcttgacactcaccggcgggttggaaggtctgaccgaagcactagaggaaagcctatcagaggagaagataattactggccaagcagttaccggactttcgcagcaagaggccgggtatgagttaaatctctctggcggagagagacttaatgcagacggagtgatcctcgcagtcccagcgttcgctgccgcccgacttcttgacggcgtgcctgaggccgcctacctagagcgcatccgctatgtcagtgttgctaatttggcgttcgcttacaggcgtgaggacgtgcctcatgatctgaatgggtccggcgtgttaatccctagaggtgaagggaggatgattacggccataacttgggtttcgtccaaatggttgcattcagcacccggtgacaaggcactgctgagagcgtacattgggcgactaggtgatgaggcttggacagccatgtgtagggccgacatcgagcgtagagtcgccgctgaactccgcgatctactaggaattgccgctagtcctttgttctgtgaactagccgcactcccagaatctatgccgcagtatccagtgggtcacgtcgaacgactcgaagccttgcgaggagcattgtgtcgcgctaaaccagggttgttgttgtgtggtgccgggtacgctggcgttggcattccagactgcattcggcaaggcaaagaagccgctgagtcgatggcggcttatttgagggacggacgctag

SEQ ID NO: 771 - DNA, 1482 bp, synthetic construct
  source 1..1482: mol_type = other DNA
  misc_feature 1..1482: note = Recombinant
atgaaggctctgaggaaacttgtggtcatcggcggagggatcactgggctttcggccgccttctatgcactaaagcaagccgatgaggaagggcagcccatctcggtcaccataattgaacagagcgataggctcggcggaaagatccagacactccgcaaggagggctgcgtaattgagaagggcccggattccttcctcgctaggaagttgccgatgattgatctagctcgggatcttggcatggactccgaattggtggcgactaatccgcacgcaaagaagacttacatcttgaggcgcggaaagctctaccggatgcctccaggcttagtgcttggcatacctacggaactaggaccattcgctaagacagggctcattagcccttggggcaaactccgcgccgctatggatttgttcattaagcctcatccagccgatgaagacgaaagtgttggcgctttcctggacagacgtctcggtagggaagtgaccgagcacattgcggaacctttattggcgggcatctacgcgggcgacttgcaagccttaagccttcaagccactttcccacagtttgcacaagtagagcgcaagcacggagggctgatacgcggtatgaaggccagcagacaggccggtcagtccgtgcctgggctgccggacgtcgccaagggtacgatgttccttacctttcgcaacgggcttaccagcttagttgaaaggttggaggaaactctcagagacagggctgaactctgtctgggcatcggcgcagaagggtttgagaaacgtgaagatggaacataccttgttcgactaagcgatggttcgaggctccaggccgacgcagtaattgtcactacgccgagctatcatgcggcatccctgttggaggagcatgtggatgcttcggccctccaggccattcgtcatgtaagcgttgcaaatgtcgttagcgtcttcgaccgaaagcaagtgaataaccagttcgacggcacagggtttgttatctcacggcgagaaggtcgcgcaatcaccgcctgtacctggacatccgtgaaatggccgcatacttcgcgcggcgacaaactgattatccggtgctacatcggtagggctggcgacgaggagcgagtggattggcccgatgaagctctcaagcgtactgtaagatcagaactgcgtgagttgctggacattgacattgatccggaatttgtggagattacacgactcaggcactctatgcctcaatacccagtcggccacgtccaggctatccgctctttgagggacgaggtcggtaggactttaccgggcgtgttccttgctgggcaaccctacgaaggtgtgggaatgcctgactgtgtgaggtccggccgggatgccgccgaagcagcagtaagtgctatgcaagcaatgagtacagaaccagaagcaccggcagaggacgccgctactggaacggcgggttga

SEQ ID NO: 772 - DNA, 1425 bp, synthetic construct
  source 1..1425: mol_type = other DNA
  misc_feature 1..1425: note = Recombinant
atgggagacaagaagcggagagttgttgttgttggcggcggcttgactggcctaagcgccgccttctacatccggaaacattatcgagaagctggagttgagcccgtcatcacgcttgttgagaaatctagctcgatgggagggatgattgagacccttcatagggacgggtttgtcatcgagaagggcccggacagtttcttggcacggaagaccgcaatgattgatctggcgaaagagctggagattgaccacgagttggtcagccagaatccagaatcgaagaagacctacataatgcaacgtggaaagctgcaccctatgccagcgggacttgttctgggcattcccaccgaattgcgtccctttctccggagcgggcttgtctcacccgctgggaagttgcgggcgctgatggacttcgtaataccgccacgaaggacgaccgaagatgagtcactcgggtacatgatcgagcgccgactgggtgccgaggtgttggagaacctcacagagccgttgctcgctggaatctacgctggcgacatgagaagattgtccctccaggctacgtttccgcagttcggtgaggtggagcgcgactacggctccttaatcagaggaatgatgaccggacgtaagcctgcggagacacacacagggaccaagaggtctgcctttctcaatttcagacagggtctgcaatcactggttcacgccttagtccatgaactccaggatgtagatcagaggttaaatactgcggtgaagtcgcttcagaggcttgacggcgcacaaacccgttatcgcgttgaactcggcaatggcgaaatgcttgaggctgacgacgtggtggttactgtaccaacctacgtggcgagcgagcttcttaagccgcacgtggacacggcggcgttagacgctattaactatgtgtcggtggctaatgtagttcttgcattcgagaagaaggaagtagagcacgtcttcgatggatcgggcttcttggtgcctcggaaggagggaaggaacataaccgcctgcacctggacttcgaccaagtggctccacacatcaccagatgacaaggttctgttacgttgttacgtgggcagaagtggagatgagcagaatgtggaactcccggatgaggcactcactaatctggtgcttaaggatctgagagagacgatgggcatcgaggcggttccaatcttctcagagattacccggctccgcaagtcaatgccgcagtacccagtaggacatctccagcacatcgccgcattgcgcgaggaactcggctctaagctaccaggagtgtacatcgccggagcgggctacgagggcgttggtcttccggattgcattcgccaggccaaagaaatgtcagtccaggcaacgcaagaactcgctgccgactga

SEQ ID NO: 773 - DNA, 1413 bp, synthetic construct
  source 1..1413: mol_type = other DNA
  misc_feature 1..1413: note = Recombinant
atgagtgacgggaagaagcacttggttataatcggggggggaataaccggcctggccagcgctttctatatggagaaggagatccgggagaagaacttacctctcagcgtgaccttggtggaggcatccccgcgggtaggggggaagatccagactgctcgaaaggacggctatatcatagagcggggcccggacagcttcctggagcgcaagaagtcggcgcccgagttagtcgaggacctcggtctcgagcacttactcgtaaacaacgctacagggcagtcttacgtcctcgtcaacgaaacactgcacccgatgcccaaaggcgcggtgatgggaatccccactaagattgcacctttcatgtcgactggccttttcagcttcagtgggaaggcgagggcggcaatggacttcgtcctgcccgcgtccaagccgaaggaggatcagagcctcggcgagtttttccgcaggcgagttggggatgaggtcgtggaaaacctcattgagcccttgctatccggaatctatgccggagacatcgacaggctcagccttatgtctactttcccccagttctaccagacagagcaaaagcaccgaagtttgatcctcgggatgaagaagacgcgtcctcagggttctggtcagaggctaacagcaaagaagcagggtcaattccagacgcttaaaacagggcttcaaacacttgtggaggaactcgagaatcagcttaaactaaccaaagtgtacaagggcacgaaggtaactaacatcagccgcggtgaaaagggctgcagcatcgcacttgacaacgggatgacactggacgcggacgcagcaatcgtcacgagcccccacaaatcagcggcgggaatgttccccgaccttccggcggtcagccagctgaaagacatgcactccacctccgtcgcaaacgtcgcgctcggcttcccgcaggaggctgtccagatggagcatgaggggactggcttcgttatcagcagaaattcggacttcagtatcacagcgtgcacttggacaaacaagaaatggcctcacagcgcacctgaggggaagacacttttgcgagcgtacgtggggaaagctggggacgagtccatagttgaactaagcgacaacgagataattaagatcgtgcttgaggaccttaagaaagtgatgaagataaagggcgagcccgaaatgacatgcgtaactagatggaatgagtccatgccacagtaccacgtcgggcacaagcagcgtatcaaaaaggtcagggaggctttggcggcctcatacccgggcgtatacatgaccggtgcatccttcgagggggtggggataccagactgcatcgaccaaggcaaatccgcagtctcagacgttttggcatacttgttcggctag

SEQ ID NO: 774 - DNA, 1413 bp, synthetic construct
  source 1..1413: mol_type = other DNA
  misc_feature 1..1413: note = Recombinant
atgtcggatggcaagaagcacctcgtcatcatcggcgggggtatcaccggacttgcgtccgcgttctacatggagaaggagatcagggagaagaacttgcccctctcagtgaccctggtggaggcctcgccccgtgttggtggtaagatccagacagcgcgaaaagacggctacattatcgagcgggggcccgactccttcctcgagaggaagaagtctgcccccgagcttgtggaggacttggggcttgagcacctcctcgtgaacaatgcgaccgggcagagctacgttttggtgaacgagaccctgcacccgatgcccaagggagccgtgatggggatccctaccaagatcgcgcctttcatgagcactcgacttttttcattcagcggcaaggccagagccgctatggactttgttctcccggcttctaagcctaaggaagaccagagtctaggcgaattcttcaggcgaagagtcggcgatgaggttgttgagaaccttatagagccattattgtcaggtatatacgcaggagacattgacaggctgtctctcatgagtaccttccctcaattctaccagacggagcagaaacacaggagcctcatattggggatgaagaagacgcgtcctcaaggaagcggacagcagttgacggccaagaagcagggccagttccaaacgctcaagaccggacttcagaccctcgtcgaggagcttgagaaccagctaaagttgacgaaggtttacaagggcactaaggtcacaaacatctcgaggggcgagaagggatgcagcatcgcgttagacaacgggatgaccctagacgctgacgcagctattgtgactagcccccataagtccgcagccggcatgtttccagacttgccggccgttagccagttgaaggacatgcactcgaccagcgtggcaaacgtcgcattgggcttcccacaggaggcggtgcagatggagcatgaggggaccggattcgtgatctcaaggaattccgatttctccattacggcatgtacctggacaaacaaaaaatggccccacagcgccccagaagggaaaacactcctacgcgcttatgttggcaaggccggcgatgagtcaattgtggagctctccgacaatgagatcatcaaaatcgttcttgaagatcttaagaaggtaatgaagattaagggggaaccggaaatgacgtgtgtgacaaggtggaacgagagtatgccccaatatcacgtgggccacaagcagaggataaagaaggtgagggaggcgttggcggcgtcttaccccggcgtgtacatgacgggggcttcattcgagggggtgggcatccccgactgcattgaccaaggcaaaagcgcggtgtctgacgtgctcgcgtacctgttcgagtag

SEQ ID NO: 775 - DNA, 1413 bp, synthetic construct
  source 1..1413: mol_type = other DNA
  misc_feature 1..1413: note = Recombinant
atgtccgacgggaagaagcacctggtaatcatcggtggtgggatcaccggtctggcttcagcgttctacatggaaaaggagatccgggagaagaacttgcccctttcggtgactctagtggaggcctctccacgggtggggggcaagattcagaccgcgcgcaaggatggctacatcatagagcgaggaccagactcattcctagagcgtaagaagtccgccccagagctcgtcgaggatctcggtctagagcacttgctagtgaataacgctacaggacagtcctacgtgctcgtgaacgagacactacacccgatgcctaagggggctgtcatgggtataccgaccaagatcgccccgttcatgtccactcgccttttctcgttctcgggcaaagctcgggccgctatggatttcgtcttgcctgcctcgaaaccgaaggaggaccagtccttaggagagttcttccgccggagggtcggcgacgaggtggtggagaacttaatcgaacccttgctctcggggatctacgctggagacattgatcgactatcgcttatgtctacgtttcctcaattttaccagacggagcagaagcaccgtagcctcattttgggtatgaagaagacacggcctcaaggttcggggcagcagcttactgccaagaagcagggccaattccagacactcaagaccggcttgcagactctagtggaggagctggagaatcaattgaagctgacaaaggtctacaagggtaccaaggtgacaaacatatcgcgtggcgaaaagggatgctccattgccctcgacaacggtatgaccctcgacgccgacgcagcgattgtgacgagcccacacaagagcgccgcgggcatgttcccggacttgcctgcagtgtcacagctgaaagacatgcattctacatccgtcgccaacgtcgccctgggctttccccaggaggctgtgcagatggagcacgaggggacgggcttcgttatcagccgcaactccgacttttctattaccgcgtgcacatggaccaacaagaagtggccgcacagcgctccggaggggaaaacacttctccgagcatacgtaggcaaggccggggacgagtcaattgttgagctctccgacaatgaaatcattaaaatagttctggaggatcttaagaaggtaatgaagataaagggggaacctgaaatgacgtgtgttacccgctggaatgagtcaatgccccagtaccatgtgggacacaagcagaggataaagaaggtgagggaggcgctcgctgcgtcctacccaggggtctacatgacaggagcgagttttgagggggtgggtattcccgactgtatcgaccagggtaagtcggcagtgtctgacgtgctcgcttacctattcgagtag

SEQ ID NO: 776 - DNA, 1434 bp, synthetic construct
  source 1..1434: mol_type = other DNA
  misc_feature 1..1434: note = Recombinant
atgtcgaagaagatcgccgttatcggtggaggcattacagggctctcggtcgcctactacgtgcgtaagctgcttcgtgagcaaggcgtcaacgctggtgtgacgctggttgagcagtctgatcgcctcggtggaaaaatccgtagccttcgcagagacgggttcacgattgaacaaggaccagattccatgatcgcgcgcaaacccgcggcgttggagctaattcgagaactcggactcgaggacaagctcgccggcactaacccacaggcaaagcggtcgtacatccttcaccgcgggaagttccacccgatgcccccaggcctgatgctcggcatcccgacccagatgtggccgatggtcaagaccgggctcctgtctcccgcggggaaactaagggccgctatggacctcctcctccctgctcggaggggcggcggtgatgagagtctcgggggatttatcaggcggagattaggccgcgaggtacttgagcaaatgaccgaaccactgctcgcaggtatctatgcaggcgatacggaacaactgtccttgaaagcaacatttccacaattcatggagatggaaagaaaacataggtccctcatactcggtcttcttgctggaaaaaagcaacctccgagacccggtggttcacaagtgcctctgcctaaagcggcgcaaacttcaatgttcctgactctgacaggcgggctcgaaggccttaccgaagctctagaggaatccttgtctgaggaaaaaataatcaccggccaggctgttaccgggcttagccaacaggaagccggttatgaactgaacctttcaggtggagagaggttgaacgccgatggggtcatattggctgtaccggcgttcgccgcggctcgcctgctggacggcgtccctgaggccgcgtatttggagcgcatacgctatgtttctgttgcgaacctcgcttttgcatatagacgggaagatgtgccccatgatcttaatggttccggagtgttgatcccacgcggggagggtcgaatgataacggcaattacttgggtttccagcaagtggttacattcggctcctggggataaagctcttttgcgggcatacatcggacgtctcggcgacgaagcctggacggccatgtgcagagccgacattgagcgacgggtcgctgcagagctgagagacttgttgggcatagctgcatctccattgttctgcgagctggctgcattgcctgaaagcatgccgcaatatccagtagggcatgtggagcgcctcgaagctctccgaggcgcgttgtgtagggcgaaacctggactgctgctctgcggtgccggctatgcaggtgtgggaattcctgactgtatcaggcaaggtaaagaagcggcagagtccatggccgcttaccttagggatgggcgctag

SEQ ID NO: 777 - DNA, 1482 bp, synthetic construct
  source 1..1482: mol_type = other DNA
  misc_feature 1..1482: note = Recombinant
atgaaggcgctgcggaagctggtggtaatcgggggggggatcacggggctgtcggccgcgttctacgcactcaagcaggccgacgaagagggtcagccaatttccgtaacgattatcgagcaatccgatcgacttggcggcaagatacagaccctgagaaaggagggatgcgtcattgaaaagggaccagattcatttctggcgaggaagctccccatgatcgatctggcgagagacttaggcatggactcggagctggtggccacaaatcctcatgcaaaaaagacttacatcctacggcgcggtaagttgtaccgcatgccaccgggcctggtgttggggattcctaccgagttaggacccttcgcgaaaaccggactcatcagcccctgggggaaacttcgagccgcgatggaccttttcatcaaaccacatccagccgatgaagatgagtctgtgggagcttttttagatagacgtttaggtcgcgaggtgacggagcacatcgcagagccgctgctcgccgggatatacgcaggcgatcttcaagctttgtccttgcaagctacgttccctcagttcgcgcaagtggaacgcaaacacggaggtctcatcagaggtatgaaagcgtctcgccaagctggacagtcagtcccagggctcccagatgtggccaagggtaccatgtttcttactttcagaaatggtttgactagcctggtggagcgtctcgaagaaacccttcgagatagagccgagctctgtctgggtatcggtgcagaggggtttgaaaaacgggaagacggcacgtaccttgttcgattatctgatggctccagattgcaagccgacgccgttatagttaccacaccatcataccatgccgcctccctactggaggagcacgtcgacgccagcgcgttacaggctatccgccacgtatctgtagccaacgtggtgagcgttttcgataggaagcaggttaacaatcagtttgatgggacaggttttgttatctcaagacgcgaaggcagggctatcactgcttgcacttggacctcagttaagtggccgcataccagccggggggataagttgataatccggtgttacattggtcgtgcaggagatgaggagcgcgtggattggccagacgaagcgctaaagcggaccgtgagaagtgagcttcgcgagctgttagacatagacatagatcccgaattcgtggaaattacacggttgaggcactctatgccacaataccctgttggtcatgtgcaagctatacggtccctgcgcgacgaagtaggccggaccttgccgggcgtgtttcttgcgggtcagccgtatgagggggttgggatgccagattgtgtgcgttctggccgcgacgcggcagaggctgccgtatcagccatgcaagccatgtcgacagaacccgaagccccggcggaagatgcagcgacaggaactgcaggttag

SEQ ID NO: 778 - DNA, 1425 bp, synthetic construct
  source 1..1425: mol_type = other DNA
  misc_feature 1..1425: note = Recombinant
atgggggataagaagaggagggtcgttgtcgtgggtgggggactgaccggactatcagccgcgttctacattagaaagcactaccgagaggccggcgtggagccggtgatcacgctggtcgagaagtcgagttcgatgggcggaatgatcgagaccctacacagggacggctttgtgattgagaagggaccagatagcttccttgcacgcaagacagccatgatcgatctcgcaaaagagctcgagatagaccacgaactggtgtctcagaacccggagtccaagaagacatatatcatgcagagaggtaaactacaccccatgccagccgggttggttctaggaatacctaccgagctccgcccgtttttgcgtagcggtctcgtgagccccgccgggaagctgcgtgcgctaatggacttcgtgatcccgcctcggcgaacgaccgaagacgaatcgctgggatacatgattgaacggcgattgggcgctgaggtgcttgaaaatcttacggagcctctgcttgcagggatttatgcgggtgatatgaggcggttgtctctccaggcaacgttcccacagttcggtgaggtagaacgcgattacggctcactgatacggggcatgatgaccggtcgcaagcctgccgagacacacaccggtacaaaaaggtcagcctttcttaatttccggcaagggttacagtcacttgttcatgcacttgtacacgaattgcaggacgtcgatcaaagacttaataccgcagtgaagagcctgcagcgcctggatggggcccaaactaggtaccgtgtggaattaggcaatggagagatgctggaggccgatgacgtggtggtcaccgtcccaacgtacgtagcttctgagctcctcaagccccacgttgacaccgcagctctggatgcaatcaattatgtgagcgtggctaatgtcgtcctggcctttgagaagaaggaagtggagcatgtgttcgacggatcagggttcttggttccgagaaaagagggcaggaatatcacggcgtgcacttggacttcgacaaaatggctccacacctccccggatgacaaagtacttctgcgatgctatgtgggccgaagtggtgatgagcagaatgtagagctccccgacgaggcactgaccaacctcgtcctcaaggacctaagggagactatgggcattgaggccgtgccaattttctctgaaataacacgcctgcgcaagtccatgccccaataccctgtgggccatcttcaacacattgcggccctgcgggaagaacttgggtctaagctgccgggcgtgtacatagcgggcgccggttacgagggtgtcgggttgcctgactgtattagacaggcaaaggaaatgtccgtgcaagcaacccaagaacttgctgctgactga

SEQ ID NO: 779 - DNA, 1413 bp, synthetic construct
  source 1..1413: mol_type = other DNA
  misc_feature 1..1413: note = Recombinant
atgagtgacggtaagaagcatttggtcatcatcggcggcggcatcaccggcttagcctccgccttctacatggaaaaggagattcgggagaagaaccttcccttgtcagttaccctggtggaggcctcgccacgggtcgggggtaaaatccagacggcccggaaggatggttatattatcgagcgcggacccgactcgttcctcgagcgcaagaagagcgcacccgaactcgttgaggaccttggcctcgaacatctcctcgttaacaatgcaactggtcagtcgtacgtcctggtcaacgagacactccatcccatgcccaagggcgcggtgatgggcattccgacgaagattgccccttttatgtcgactggccttttcagcttctcgggaaaggcccgtgccgctatggacttcgtcctccctgcctcgaaaccgaaggaggaccagtctcttggagaattttttaggcgcagagtgggggacgaggttgtggagaatctgatcgaaccgcttctgagcggaatctatgcgggcgacattgaccgcctctcactcatgagcaccttcccacaattctaccagacggagcagaagcatcggtcactcatcctggggatgaaaaaaacccggcctcaaggatcaggacaaaggcttacagctaaaaagcaggggcagtttcaaactctcaagacgggcctgcagactctagtcgaggagttagaaaaccagttgaagttgaccaaggtgtacaagggcacgaaagtgacaaacatcagccggggcgaaaagggttgttcaatcgcgttggacaacggcatgaccctggacgcagacgcagcaatcgtgacatcgccccacaagagtgctgcgggcatgttccctgatctgccggcggtcagccagcttaaggatatgcactcaacctcggtggctaacgtggccttgggcttccctcaggaggccgtccaaatggagcacgaaggaaccggctttgttatcagccgtaacagtgacttctcgattaccgcttgtacctggacgaacaagaagtggcctcacagcgcgccagaagggaagaccctcctgcgagcctacgtcggcaaggctggtgacgagtcgatcgttgagttgtctgacaacgagattatcaagatcgtacttgaagatctcaagaaggtcatgaagataaagggtgaacccgagatgacttgcgttactagatggaacgagtctatgcctcagtatcacgtggggcacaagcagaggatcaagaaggtccgggaggccttggctgcctcgtatccgggagtctacatgaccggggcctcatttgagggagtcggtatccccgactgcatcgaccaaggaaagtccgccgtctctgacgtgttggcttatctattcggctag

SEQ ID NO: 780 - DNA, 1413 bp, synthetic construct
  source 1..1413: mol_type = other DNA
  misc_feature 1..1413: note = Recombinant
atgagcgacggaaagaaacatctcgtgatcatcgggggcggaataacaggcctagcctcggcattctacatggagaaggagatcagagagaaaaacctcccgctctctgtgaccctggtggaggcttcaccgagagtgggcgggaagatacagacggcgcgcaaggatggctacataatagagcggggcccagattctttcctggagagaaaaaaaagcgccccggaattggtggaggacctcggcctcgaacacctcctggtgaataacgcaacagggcaaagctacgtactcgttaatgagactctccaccccatgccaaaaggggccgtgatgggaatccccacaaagatcgctccattcatgagcaccaggttattctctttctctggtaaagctagggcagccatggacttcgtcctgccagcctccaaaccgaaagaagaccaaagcctcggggaattcttccgccggagggtgggcgacgaggtggttgagaatttaattgaacctctcctctcaggtatatacgcaggggacatcgaccgcttgtcgctgatgagcacctttccgcagttctaccagacggagcagaagcatcgctcactcattcttggtatgaagaagactcgtccgcaagggtctggccagcagctgacagccaagaaacaggggcagttccaaactcttaagaccggcctacagactctggtggaggagctcgagaaccagctgaagctcacaaaggtttacaagggcacaaaggtgacaaacatctcaaggggggagaagggttgctccatcgcgctcgataacggcatgacactcgatgctgatgcggcgatagtaactagcccgcacaagtcggccgcgggaatgttccccgacctccccgcggtctcgcaactgaaggacatgcattccaccagcgtcgccaacgtagctctaggctttcctcaggaggcagtccaaatggaacacgagggcacgggtttcgtaatctcccgcaacagcgacttctcaatcactgcttgcacgtggactaacaagaagtggccgcattcggcccccgagggcaagacgcttcttcgagcatacgtgggtaaggctggtgatgagagtatcgtcgagctctcggacaacgagatcattaagatcgtgttggaggacttgaagaaggtgatgaaaatcaagggggagccggaaatgacttgcgtgactcgctggaacgagagcatgccgcagtaccacgttgggcataagcagaggataaagaaagttcgcgaagcgctggccgcgtcttaccctggagtgtatatgacgggagcctcctttgagggtgtggggatcccggactgcatcgaccagggaaagtcagctgtctccgacgtgctggcctacttattcgagtga

SEQ ID NO: 781 - DNA, 1428 bp, synthetic construct
  source 1..1428: mol_type = other DNA
  misc_feature 1..1428: note = Recombinant
aagaagattgcagtcattggtggtgggataacagggttgtccgtggcctactacgtgaggaagctgcttcgggagcaaggcgttaatgcgggcgttaccctcgtcgagcaatccgaccgcctcggcgggaagattagatccttgagacgagacggctttaccattgagcaaggccctgactctatgattgcacgtaagcccgcagctctcgaacttatccgtgagcttggtctggaggacaagttggcgggcacaaaccctcaagccaaacgctcctacatactgcaccgtggcaagtttcatccgatgccacctgggctgatgctcgggattcccactcaaatgtggccaatggtcaagaccgggctgctatctccggccggaaagctacgggctgcgatggacctacttcttcctgcaaggcgcggaggcggcgacgaatcacttggtgggtttatccggaggcggcttggacgtgaggtgttggagcagatgaccgaaccactccttgctggaatctatgctggcgacacagaacagctttcacttaaagcgacctttcctcaattcatggagatggaaaggaaacatcgcagtctcatccttggactattggctgggaagaaacagccaccgcgtcccggtggtagccaagtgccgctcccaaaggccgctcagaccagtatgttcttgacactcaccggcgggttggaaggtctgaccgaagcactagaggaaagcctatcagaggagaagataattactggccaagcagttaccggactttcgcagcaagaggccgggtatgagttaaatctctctggcggagagagacttaatgcagacggagtgatcctcgcagtcccagcgttcgctgccgcccgacttcttgacggcgtgcctgaggccgcctacctagagcgcatccgctatgtcagtgttgctaatttggcgttcgcttacaggcgtgaggacgtgcctcatgatctgaatgggtccggcgtgttaatccctagaggtgaagggaggatgattacggccataacttgggtttcgtccaaatggttgcattcagcacccggtgacaaggcactgctgagagcgtacattgggcgactaggtgatgaggcttggacagccatgtgtagggccgacatcgagcgtagagtcgccgctgaactccgcgatctactaggaattgccgctagtcctttgttctgtgaactagccgcactcccagaatctatgccgcagtatccagtgggtcacgtcgaacgactcgaagccttgcgaggagcattgtgtcgcgctaaaccagggttgttgttgtgtggtgccgggtacgctggcgttggcattccagactgcattcggcaaggcaaagaagccgctgagtcgatggcggcttatttgagggacggacgctag

SEQ ID NO: 782 - DNA, 1470 bp, synthetic construct
  source 1..1470: mol_type = other DNA
  misc_feature 1..1470: note = Recombinant
aggaaacttgtggtcatcggcggagggatcactgggctttcggccgccttctatgcactaaagcaagccgatgaggaagggcagcccatctcggtcaccataattgaacagagcgataggctcggcggaaagatccagacactccgcaaggagggctgcgtaattgagaagggcccggattccttcctcgctaggaagttgccgatgattgatctagctcgggatcttggcatggactccgaattggtggcgactaatccgcacgcaaagaagacttacatcttgaggcgcggaaagctctaccggatgcctccaggcttagtgcttggcatacctacggaactaggaccattcgctaagacagggctcattagcccttggggcaaactccgcgccgctatggatttgttcattaagcctcatccagccgatgaagacgaaagtgttggcgctttcctggacagacgtctcggtagggaagtgaccgagcacattgcggaacctttattggcgggcatctacgcgggcgacttgcaagccttaagccttcaagccactttcccacagtttgcacaagtagagcgcaagcacggagggctgatacgcggtatgaaggccagcagacaggccggtcagtccgtgcctgggctgccggacgtcgccaagggtacgatgttccttacctttcgcaacgggcttaccagcttagttgaaaggttggaggaaactctcagagacagggctgaactctgtctgggcatcggcgcagaagggtttgagaaacgtgaagatggaacataccttgttcgactaagcgatggttcgaggctccaggccgacgcagtaattgtcactacgccgagctatcatgcggcatccctgttggaggagcatgtggatgcttcggccctccaggccattcgtcatgtaagcgttgcaaatgtcgttagcgtcttcgaccgaaagcaagtgaataaccagttcgacggcacagggtttgttatctcacggcgagaaggtcgcgcaatcaccgcctgtacctggacatccgtgaaatggccgcatacttcgcgcggcgacaaactgattatccggtgctacatcggtagggctggcgacgaggagcgagtggattggcccgatgaagctctcaagcgtactgtaagatcagaactgcgtgagttgctggacattgacattgatccggaatttgtggagattacacgactcaggcactctatgcctcaatacccagtcggccacgtccaggctatccgctctttgagggacgaggtcggtaggactttaccgggcgtgttccttgctgggcaaccctacgaaggtgtgggaatgcctgactgtgtgaggtccggccgggatgccgccgaagcagcagtaagtgctatgcaagcaatgagtacagaaccagaagcaccggcagaggacgccgctactggaacggcgggttga

SEQ ID NO: 783 - DNA, 1410 bp, synthetic construct
  source 1..1410: mol_type = other DNA
  misc_feature 1..1410: note = Recombinant
cggagagttgttgttgttggcggcggcttgactggcctaagcgccgccttctacatccggaaacattatcgagaagctggagttgagcccgtcatcacgcttgttgagaaatctagctcgatgggagggatgattgagacccttcatagggacgggtttgtcatcgagaagggcccggacagtttcttggcacggaagaccgcaatgattgatctggcgaaagagctggagattgaccacgagttggtcagccagaatccagaatcgaagaagacctacataatgcaacgtggaaagctgcaccctatgccagcgggacttgttctgggcattcccaccgaattgcgtccctttctccggagcgggcttgtctcacccgctgggaagttgcgggcgctgatggacttcgtaataccgccacgaaggacgaccgaagatgagtcactcgggtacatgatcgagcgccgactgggtgccgaggtgttggagaacctcacagagccgttgctcgctggaatctacgctggcgacatgagaagattgtccctccaggctacgtttccgcagttcggtgaggtggagcgcgactacggctccttaatcagaggaatgatgaccggacgtaagcctgcggagacacacacagggaccaagaggtctgcctttctcaatttcagacagggtctgcaatcactggttcacgccttagtccatgaactccaggatgtagatcagaggttaaatactgcggtgaagtcgcttcagaggcttgacggcgcacaaacccgttatcgcgttgaactcggcaatggcgaaatgcttgaggctgacgacgtggtggttactgtaccaacctacgtggcgagcgagcttcttaagccgcacgtggacacggcggcgttagacgctattaactatgtgtcggtggctaatgtagttcttgcattcgagaagaaggaagtagagcacgtcttcgatggatcgggcttcttggtgcctcggaaggagggaaggaacataaccgcctgcacctggacttcgaccaagtggctccacacatcaccagatgacaaggttctgttacgttgttacgtgggcagaagtggagatgagcagaatgtggaactcccggatgaggcactcactaatctggtgcttaaggatctgagagagacgatgggcatcgaggcggttccaatcttctcagagattacccggctccgcaagtcaatgccgcagtacccagtaggacatctccagcacatcgccgcattgcgcgaggaactcggctctaagctaccaggagtgtacatcgccggagcgggctacgagggcgttggtcttccggattgcattcgccaggccaaagaaatgtcagtccaggcaacgcaagaactcgctgccgactga

SEQ ID NO: 784 - DNA, 1398 bp, synthetic construct
  source 1..1398: mol_type = other DNA
  misc_feature 1..1398: note = Recombinant
aagcacctggtaatcatcggtggtgggatcaccggtctggcttcagcgttctacatggaaaaggagatccgggagaagaacttgcccctttcggtgactctagtggaggcctctccacgggtggggggcaagattcagaccgcgcgcaaggatggctacatcatagagcgaggaccagactcattcctagagcgtaagaagtccgccccagagctcgtcgaggatctcggtctagagcacttgctagtgaataacgctacaggacagtcctacgtgctcgtgaacgagacactacacccgatgcctaagggggctgtcatgggtataccgaccaagatcgccccgttcatgtccactcgccttttctcgttctcgggcaaagctcgggccgctatggatttcgtcttgcctgcctcgaaaccgaaggaggaccagtccttaggagagttcttccgccggagggtcggcgacgaggtggtggagaacttaatcgaacccttgctctcggggatctacgctggagacattgatcgactatcgcttatgtctacgtttcctcaattttaccagacggagcagaagcaccgtagcctcattttgggtatgaagaagacacggcctcaaggttcggggcagcagcttactgccaagaagcagggccaattccagacactcaagaccggcttgcagactctagtggaggagctggagaatcaattgaagctgacaaaggtctacaagggtaccaaggtgacaaacatatcgcgtggcgaaaagggatgctccattgccctcgacaacggtatgaccctcgacgccgacgcagcgattgtgacgagcccacacaagagcgccgcgggcatgttcccggacttgcctgcagtgtcacagctgaaagacatgcattctacatccgtcgccaacgtcgccctgggctttccccaggaggctgtgcagatggagcacgaggggacgggcttcgttatcagccgcaactccgacttttctattaccgcgtgcacatggaccaacaagaagtggccgcacagcgctccggaggggaaaacacttctccgagcatacgtaggcaaggccggggacgagtcaattgttgagctctccgacaatgaaatcattaaaatagttctggaggatcttaagaaggtaatgaagataaagggggaacctgaaatgacgtgtgttacccgctggaatgagtcaatgccccagtaccatgtgggacacaagcagaggataaagaaggtgagggaggcgctcgctgcgtcctacccaggggtctacatgacaggagcgagttttgagggggtgggtattcccgactgtatcgaccagggtaagtcggcagtgtctgacgtgctcgcttacctattcgagtag

SEQ ID NO: 785 - DNA, 1422 bp, synthetic construct
  source 1..1422: mol_type = other DNA
  misc_feature 1..1422: note = Recombinant
attgcagtcattggtggtgggataacagggttgtccgtggcctactacgtgaggaagctgcttcgggagcaaggcgttaatgcgggcgttaccctcgtcgagcaatccgaccgcctcggcgggaagattagatccttgagacgagacggctttaccattgagcaaggccctgactctatgattgcacgtaagcccgcagctctcgaacttatccgtgagcttggtctggaggacaagttggcgggcacaaaccctcaagccaaacgctcctacatactgcaccgtggcaagtttcatccgatgccacctgggctgatgctcgggattcccactcaaatgtggccaatggtcaagaccgggctgctatctccggccggaaagctacgggctgcgatggacctacttcttcctgcaaggcgcggaggcggcgacgaatcacttggtgggtttatccggaggcggcttggacgtgaggtgttggagcagatgaccgaaccactccttgctggaatctatgctggcgacacagaacagctttcacttaaagcgacctttcctcaattcatggagatggaaaggaaacatcgcagtctcatccttggactattggctgggaagaaacagccaccgcgtcccggtggtagccaagtgccgctcccaaaggccgctcagaccagtatgttcttgacactcaccggcgggttggaaggtctgaccgaagcactagaggaaagcctatcagaggagaagataattactggccaagcagttaccggactttcgcagcaagaggccgggtatgagttaaatctctctggcggagagagacttaatgcagacggagtgatcctcgcagtcccagcgttcgctgccgcccgacttcttgacggcgtgcctgaggccgcctacctagagcgcatccgctatgtcagtgttgctaatttggcgttcgcttacaggcgtgaggacgtgcctcatgatctgaatgggtccggcgtgttaatccctagaggtgaagggaggatgattacggccataacttgggtttcgtccaaatggttgcattcagcacccggtgacaaggcactgctgagagcgtacattgggcgactaggtgatgaggcttggacagccatgtgtagggccgacatcgagcgtagagtcgccgctgaactccgcgatctactaggaattgccgctagtcctttgttctgtgaactagccgcactcccagaatctatgccgcagtatccagtgggtcacgtcgaacgactcgaagccttgcgaggagcattgtgtcgcgctaaaccagggttgttgttgtgtggtgccgggtacgctggcgttggcattccagactgcattcggcaaggcaaagaagccgctgagtcgatggcggcttatttgagggacggacgctag

SEQ ID NO: 786 - DNA, 1464 bp, synthetic construct
  source 1..1464: mol_type = other DNA
  misc_feature 1..1464: note = Recombinant
cttgtggtcatcggcggagggatcactgggctttcggccgccttctatgcactaaagcaagccgatgaggaagggcagcccatctcggtcaccataattgaacagagcgataggctcggcggaaagatccagacactccgcaaggagggctgcgtaattgagaagggcccggattccttcctcgctaggaagttgccgatgattgatctagctcgggatcttggcatggactccgaattggtggcgactaatccgcacgcaaagaagacttacatcttgaggcgcggaaagctctaccggatgcctccaggcttagtgcttggcatacctacggaactaggaccattcgctaagacagggctcattagcccttggggcaaactccgcgccgctatggatttgttcattaagcctcatccagccgatgaagacgaaagtgttggcgctttcctggacagacgtctcggtagggaagtgaccgagcacattgcggaacctttattggcgggcatctacgcgggcgacttgcaagccttaagccttcaagccactttcccacagtttgcacaagtagagcgcaagcacggagggctgatacgcggtatgaaggccagcagacaggccggtcagtccgtgcctgggctgccggacgtcgccaagggtacgatgttccttacctttcgcaacgggcttaccagcttagttgaaaggttggaggaaactctcagagacagggctgaactctgtctgggcatcggcgcagaagggtttgagaaacgtgaagatggaacataccttgttcgactaagcgatggttcgaggctccaggccgacgcagtaattgtcactacgccgagctatcatgcggcatccctgttggaggagcatgtggatgcttcggccctccaggccattcgtcatgtaagcgttgcaaatgtcgttagcgtcttcgaccgaaagcaagtgaataaccagttcgacggcacagggtttgttatctcacggcgagaaggtcgcgcaatcaccgcctgtacctggacatccgtgaaatggccgcatacttcgcgcggcgacaaactgattatccggtgctacatcggtagggctggcgacgaggagcgagtggattggcccgatgaagctctcaagcgtactgtaagatcagaactgcgtgagttgctggacattgacattgatccggaatttgtggagattacacgactcaggcactctatgcctcaatacccagtcggccacgtccaggctatccgctctttgagggacgaggtcggtaggactttaccgggcgtgttccttgctgggcaaccctacgaaggtgtgggaatgcctgactgtgtgaggtccggccgggatgccgccgaagcagcagtaagtgctatgcaagcaatgagtacagaaccagaagcaccggcagaggacgccgctactggaacggcgggttga

SEQ ID NO: 787 - DNA, 1404 bp, synthetic construct
  source 1..1404: mol_type = other DNA
  misc_feature 1..1404: note = Recombinant
gttgttgttgttggcggcggcttgactggcctaagcgccgccttctacatccggaaacattatcgagaagctggagttgagcccgtcatcacgcttgttgagaaatctagctcgatgggagggatgattgagacccttcatagggacgggtttgtcatcgagaagggcccggacagtttcttggcacggaagaccgcaatgattgatctggcgaaagagctggagattgaccacgagttggtcagccagaatccagaatcgaagaagacctacataatgcaacgtggaaagctgcaccctatgccagcgggacttgttctgggcattcccaccgaattgcgtccctttctccggagcgggcttgtctcacccgctgggaagttgcgggcgctgatggacttcgtaataccgccacgaaggacgaccgaagatgagtcactcgggtacatgatcgagcgccgactgggtgccgaggtgttggagaacctcacagagccgttgctcgctggaatctacgctggcgacatgagaagattgtccctccaggctacgtttccgcagttcggtgaggtggagcgcgactacggctccttaatcagaggaatgatgaccggacgtaagcctgcggagacacacacagggaccaagaggtctgcctttctcaatttcagacagggtctgcaatcactggttcacgccttagtccatgaactccaggatgtagatcagaggttaaatactgcggtgaagtcgcttcagaggcttgacggcgcacaaacccgttatcgcgttgaactcggcaatggcgaaatgcttgaggctgacgacgtggtggttactgtaccaacctacgtggcgagcgagcttcttaagccgcacgtggacacggcggcgttagacgctattaactatgtgtcggtggctaatgtagttcttgcattcgagaagaaggaagtagagcacgtcttcgatggatcgggcttcttggtgcctcggaaggagggaaggaacataaccgcctgcacctggacttcgaccaagtggctccacacatcaccagatgacaaggttctgttacgttgttacgtgggcagaagtggagatgagcagaatgtggaactcccggatgaggcactcactaatctggtgcttaaggatctgagagagacgatgggcatcgaggcggttccaatcttctcagagattacccggctccgcaagtcaatgccgcagtacccagtaggacatctccagcacatcgccgcattgcgcgaggaactcggctctaagctaccaggagtgtacatcgccggagcgggctacgagggcgttggtcttccggattgcattcgccaggccaaagaaatgtcagtccaggcaacgcaagaactcgctgccgactga

SEQ ID NO: 788 - DNA, 1398 bp, synthetic construct; identical to SEQ ID NO: 784
  source 1..1398: mol_type = other DNA
  misc_feature 1..1398: note = Recombinant

SEQ ID NO: 789 - protein, 181 aa, Escherichia coli; identical to SEQ ID NO: 448

SEQ ID NO: 790 - DNA, 546 bp, Escherichia coli; identical to SEQ ID NO: 570
  source 1..546: mol_type = unassigned DNA

SEQ ID NO: 791 - DNA, 546 bp, synthetic construct; identical to SEQ ID NO: 685
  source 1..546: mol_type = other DNA
  misc_feature 1..546: note = Recombinant

SEQ ID NO: 792 - DNA, 546 bp, synthetic construct; identical to SEQ ID NO: 707
  source 1..546: mol_type = other DNA
  misc_feature 1..546: note = Recombinant

SEQ ID NO: 793 - protein, 504 aa, Amaranthus tuberculatus; identical to SEQ ID NO: 671

SEQ ID NO: 794 - DNA, 1515 bp, synthetic construct
  source 1..1515: mol_type = other DNA
  misc_feature 1..1515: note = Recombinant
atgggcaacattagcgaacgcgaagaaccgaccagcgcgaaacgcgtggcggtggtgggcgcgggcgtgagcggcctggcggcggcgtataagctgaagagccatggactgagtgtaaccctgttcgaagcggatagccgcgcaggcggcaagctgaagaccgtgaagaaggatggcttcatatgggatgaaggcgcgaacaccatgaccgagagcgaggcggaggtgagcagtctgatagatgatcttggccttcgcgagaagcagcaactgccgattagccagaacaaacgctatattgcgcgcgatggcctgccggtgctgctgccgagcaacccggcggcgctgctgaccagcaacattctgagcgcgaaaagcaaactgcagattatgctggaaccgtttctgtggcgcaaacataacgcgaccgaactgagcgatgaacatgtgcaggaaagcgtgggcgaattttttgaacgccattttggcaaagaatttgtggattatgtgattgatccgtttgtggcgggcacctgcggcggcgatccgcagagcctgagcatgcatcatacctttccggaagtgtggaacattgaaaaacgctttggcagcgtgtttgcgggcctgattcagagcacgctgctgagcaagaaagagaaaggaggcgagaacgcgagcattaaaaaaccgcgcgtgcgcggcagctttagctttcagggcggcatgcagaccctggtggataccatgtgcaaacagctgggcgaagatgaactgaaactgcagtgcgaagtgctgagcctgagctataaccagaaaggcattccgagcctgggcaactggagcgtgagcagcatgagcaacaacaccagcgaagatcagagctatgatgcggtggtggtgaccgcgccgattcgcaacgtgaaagagatgaagattatgaagttcggcaacccgttcagcctggattttattccggaagtgacctatgtgccgctgagcgtgatgattaccgcgtttaaaaaagataaagtgaaacgcccgctggaaggcttcggcgtgctgataccgagcaaggagcagcacaatggccttaagacccttggcactctgttcagcagtatgatgttcccggatcgcgcaccgagcgatatgtgcctgtttaccacctttgtgggcggcagccgcaaccgcaagctggcgaacgcgagcaccgatgaactgaagcagattgtgagcagcgatctgcagcaactgctgggcaccgaagatgaaccgagctttgtgaaccatctgttctggagcaacgcgtttccgctgtatggccataactatgatagcgtgctgcgcgcaattgataagatggaaaaggatctgccgggcttcttctatgcgggcaaccataaaggcggcctgagcgtgggcaaagcgatggcgagcggctgcaaagcggcggaactggtgattagctatctggatagccatatttatgtgaaaatggatgagaagaccgcgtga

SEQ ID NO: 795 - protein, 529 aa, Eleusine indica
MVATPAMAAAAPPLRAPRFHARHRRRSVRCAVASDATEAPAAPGARLSADCVVVGGGISGLCTAQALATKHGIGDVLVTEARARPGGNITTVERPDEGYLWEEGPNSFQPSDPVLTMAVDSGLKEDLVFGDPNAPRFVLWEGKLRPVPSKPADLPFFDLMSIPGKLRAGLGALGIRPPPPGREESVEEFVRRNLGAEVFERLIEPFCSGVYAGDPSKLSMKAAFGKVWRLEEAGGSIIGGTIKTIQERGKNPKPERDPRLPKPKGQTVASFRKGLAMLPNAITSRLGSKVKLSWKLTSITKSDSKGYVLVYETPEGIVSVQAKSVIMTIPSYVASDILRPLSSDAADALSRFYYPPVAAVTVSYPKEAIRKECLIDGELQGFGQLHPRSQGVETLGTIYSSSLFPNRAPAGRVLLLNYIGGATNTGIVSKSESELVEAVDRDLRKMLINPRAVDPYVLGVRVWPQAIPQFLVGHLDILDAAKSALNRSGYDGLFLGGNYVAGVALGRCVEGAYESASQISDFLTKYAYK

SEQ ID NO: 796 - DNA, 3816 bp, Eleusine indica
  source 1..3816: mol_type = unassigned DNA
  variation 689: note = n is a, c, g, or t
atggtcgccacgcccgcaatggccgccgccgcgccgccgctccgagcgccgcgattccatgcgcgtcaccgccgcagaagcgtgcgctgcgcggtggccagcgacgccaccgaggcgccggccgcgcccggcgcgcggctgtccgcggactgcgtcgtggtgggcggcggcatcagcggcctctgcacggcgcaggcgctggccacgaaacacggcatcggagacgtacttgtcacggaggcccgcgcccgccccggcggcaacatcaccaccgtcgagcgccccgacgaggggtacttatgggaggaagggcccaacagcttccagccctccgaccccgtcctcaccatggccgtacgcttctcgctcccttcttctattcctcttacagtacatttctcgtgaacgctgaatgaactgggcgcgcgcgcgcaggtggacagcggactcaaggaggacttggtgtttggagacccgaacgcgccgaggttcgtcctgtgggaagggaagctgaggccggtgccgtccaagcccgccgaccttccgttcttcgatctcatgagcatcccgggcaagctccgggccggccttggcgccctcggcattcgcccgccgcctccagttcgttctctccccaaatgctgcattcgtgattcttctgcattttgattgttcaactgtcattggangttcgttctctccccaaatgctgcattcgtgattcttctgcattttgattgttcaactgtcattggcgctgagcgttactggcaaaggtttcagggccgtgaggagtcggtggaggagtttgtgcgccgcaacctcggtgctgaggtctttgagcgcctcatcgagcctttctgctcaggtgcttattgcattgtacaatggctgttttgttatgatttcctgcttgcagtcattccctataaaagaatgtaacagtttcaatgttaacataaggtgtctatgctggtgatccttcaaaactcagtatgaaggctgcatttgggaaggtatggaggcttgaggaggctggaggtagtattattggtggaacaattaaaacaatccaggagaggggcaagaatcctaagccagagagggatccgtaagagaacaacttacttttcttctgttgcattatctgtctattcttatcattctgatcaattttctccagccgccttccaaagccaaagggacagactgttgcatccttcaggaagggtctcgccatgcttccaaatgccattacatccaggtttattctcatatcatgtatatactatttgtatagcgcatcaactttgcacgagggtgccacagattgtttggatagacgtagtccttcagagacttcgtacatctcgtttgccaaattcattaccatattattgcatcacctcttttcatcctcagtgcatattagttaggttactttcaccctttttcatctcactttatgttgtcatttacaatataggtaaatggtttctagttgtctgtggaaactactaacatatatggcttcagattgtaagggataaatacagattatgcatttattctagtgtgtgtgcttgtgacttcatcaaaagctatgaaaatttgcaattgagatatctgatatagacttatggtactaaccacttaactttgttccattctgatccacctttgtttacaggttgggtagtaaagtcaaactgtcttggaaactcacaagcattacaaaatcagacagcaagggttatgtattggtgtatgaaacaccagaaggaatcgtctcagtccaggctaaaagtgttatcatgaccattccctcctacgttgctagtgacatcttgcgcccactttcagtaagtataaaactaatcaaatttcatgttctgtaaactgaggcactgttagcttcttaattgggaaatgggcacccagcagtagcattcacacttaaggaattcattctttctgccattctgtagtcaacgtctcaatgcagagatgtatagaaacacaaaggaaattgctacaccttgtttgatttgagtaacatctgaatgtttaattttcagaatggatcatctttctgagatatgcataatgtaacttaagcctttcctaattactaaacacaattgaattgctgagattgaagagaagcttgtgcaccatcatttgagatggcttgcacatatccaacagaggcctcaagatgcactggtaatgtgaacaagaggcagaggaagaccaaacttgacattggaggagtctgtgaagagggatatgaaggactggaatatcgttaaggagttagctatagatagagaacgtgtaaaccaataactaacgtgccaaaaccttgattttcggtttcccccatttttacccttttctgtttggtttattattgttcttttcctctccttgtttctttctttttttcctttttgtgtaatctctttgtgtgagtcttgcgggtttcatctctagtctatcccaacttgggactaaaaggttttattgttgttgttgaattcaattgctgagatcagaaggattgaacggaagaaggttatgcgaatggaaatgctttaggtcgagggcaaaagagtcataatattgatgtactagttcggtttggacagcttcttaaccaattaatgttctaggctttcaaataatctgaaacaacaacgttttatgtttctactgttttcctaagtttatatcttgttcgaacaaaaatggacgtagtgatcaattttgataattctatatgttcaggtaactgctatataacttgtcaactacagaattggggttattcaagtatgagagaggagactatgtttagtagcactatacaatttcctagaatttctaaggtaatgtaggcatacttaacttgtttttccataccacagagtgatgctgcagatgctctttcaagattctattatccaccagtcgctgctgtaactgtttcatatccaaaggaagcaattcgaaaagaatgcttaatcgatggggagctccagggtttcggccagttgcatccacgtagtcaaggagttgagacattaggtaaattttcctttttttttacatttgagtcttacgctctgtacagatcattatcattattatgtggcttaatgtttttattgtatttgttaaagtactatttggattgcaaatcgacaatcttattggtgttattcttttcaaaggaacaatatacagctcttcgctctttccgaatcgtgctcctgctggaagggtcttacttcttaactacataggaggtgctacaaatacagggatcgtttccaaggttctattctctgtcaaactgattgatccttatttgttcatgatcttctgatatgtttacaacatcctttactgtgatcttcaaataaaacacatgttactgctgatcacctattcttcattgattgacgtaaatgctgactgcatttttcactactgatctcatcttatttgcagagcgaaagtgagctggtagaagcagttgaccgtgatcttaggaaaatgctcataaatcctagagcagtggatccttatgtccttggtgtgcgggtgtggccacaagctattcctcagttcctggtaggacatcttgatattctcgatgctgcaaaatctgccctcaacagaagtggctacgatgggctattcctgggagggaactatgtagcaggagttgctctggggcgctgcgttgaaggtgcatatgaaagtgcctcacaaatatctgacttcttgaccaagtacgcctacaagtga

SEQ ID NO: 797 - protein, 511 aa, Eleusine indica
MAGSDDTRAAPARSVAVVGAGVSGLAAAYRLRKSGVNVTVFEAGDRAGGKIRSNSEGGFLWDEGANTMTESELEVSRLIDDLGLQDRQQYPNSQHKRYIVKDGAPVLIPSDPISLIKSSVLSTKSKFALFLEPFIYKKTSTRNSGIVSDEHLSESVGSFFERHFGQEVVDYLIDPFVAGTSGGDPESLSIRHAFPALWNLEKKYGSVIAGAILSKLTAKRDPVKKTSDSSGKRRNRRVSFSFLGGMQSLIDALHNEVGDGNVKLSTEVLSLACSVDGVPASGGWSISIDSKNTGSKEFGKKQAFDAVIMTAPLSNVQKMKFMKGGAPFVLDFLPKVDYLPLSLMVTAYKKEDVKRPLEGFGVLIPYKEQQKHGLKTLGTLFSSMMFPDRAPSDQFLYTTFIGGSHNRDLAGAPTTILKQLVTSDLRKLLGVEGQPTFVKHVYWRNAFPLYGRDYNSVLEAIEKMEKNLPGFFYAGNNKDGLAVGSVIASGSKAADLAISYLESRTKHDSSH

SEQ ID NO: 798 - DNA, 1537 bp, Eleusine indica
  source 1..1537: mol_type = unassigned DNA
atggcgggctccgacgacacgcgcgccgctcccgccaggtcggtcgccgtcgtgggcgccggcgtcagtgggctcgcggcggcgtacaggctgcggaagagcggcgtcaacgtgacggtgttcgaggcgggtgacagggccggagggaagatacgaagcaactccgagggtggattcctctgggatgaaggggccaacaccatgacagaaagtgaattggaggtcagcagattaattgatgatcttggtctccaagacagacagcagtatcctaactcccaacacaagcgttacattgtcaaagatggtgcaccagtactgattccttcagatcctatttccttaataaaaagcagtgttctgtctacaaaatcaaagtttgcattatttctagagccatttatttacaagaagactagcacaagaaactctggaatagtgtctgatgagcatttaagtgagagtgttgggagcttctttgaacgccactttggacaagaggtagttgactatcttatcgatccatttgtagctggaacaagtggcggagatcctgagtcattatctattcgacatgcatttccagcactgtggaatttagagaaaaagtatggttctgtcattgctggcgccatcttgtctaaactaactgccaaacgcgatcctgtcaagaaaacaagtgattcatcagggaaaagaaggaataggcgtgtgtcattttcatttcttggaggaatgcagtcactaatagatgcacttcacaatgaagttggagatggtaatgtgaagctcagtacagaagtgttgtccctggcatgtagtgtcgatggtgtgcctgcatccggtgggtggtcaatttctattgattcaaaaaataccggtagcaaggagtttggaaagaaacaagccttcgatgctgtaataatgacagctccattgtctaatgtgcagaagatgaagtttatgaaagggggagctccatttgtgttagactttcttcctaaggtggattatctgccactatccctcatggtgacagcttacaagaaggaagacgtcaagagacctctggaaggatttggggtactaataccctataaggaacagcaaaagcatggcctgaaaactcttggtactctcttctcctcgatgatgttcccagatcgagctcctagtgatcaatttctatatacaactttcattgggggtagccacaatcgagatcttgctggagctccaacgactattctaaagcaacttgtgacatctgaccttagaaagcttttgggtgtggaagggcaaccaacttttgtcaagcatgtatactggagaaatgcttttcctttgtatggccgtgattacaattccgtattggaagctatagagaagatggagaaaaatctaccagggttcttctatgcaggaaataacaaggatgggctggctgttgggagtgttatagcttctggaagcaaggctgctgaccttgcaatttcgtatcttgaatctcgcacaaagcatgacagttcacattgaa

SEQ ID NO: 799 - protein, 1587 aa, synthetic construct
  REGION 1..1587: note = Codon-optimized protoporphyrinogen oxidase (PPO1)
ATGGTTGCAACACCTGCTATGGCTGCAGCTGCACCACCTTTGAGGGCACCAAGATTTCATGCTAGGCACAGAAGAAGGTCTGTTAGATGTGCTGTTGCATCAGATGCAACCGAGGCTCCAGCTGCACCTGGTGCAAGGTTGTCTGCTGATTGTGTTGTGGTTGGAGGTGGAATTTCAGGATTGTGCACAGCTCAAGCACTTGCTACCAAGCATGGTATTGGAGATGTGCTTGTTACTGAAGCAAGGGCTAGACCAGGTGGAAACATTACTACAGTGGAGAGACCTGATGAAGGTTATTTGTGGGAGGAAGGACCAAATTCTTTCCAGCCATCAGATCCTGTGCTTACAATGGCTGTTGATTCTGGTTTGAAGGAAGATTTGGTTTTTGGAGATCCAAACGCACCTAGGTTCGTGTTGTGGGAGGGAAAGTTGAGACCAGTTCCTTCTAAGCCAGCTGATTTGCCATTTTTCGATCTTATGTCAATTCCTGGAAAGTTGAGGGCAGGTTTGGGAGCTTTGGGTATTAGGCCACCTCCACCTGGAAGAGAGGAATCTGTGGAGGAATTTGTTAGGAGAAATTTGGGTGCTGAGGTGTTTGAAAGACTTATTGAGCCTTTCTGCTCAGGTGTTTACACCGGAGATCCATCTAAGTTGTCTATGAAGGCTGCATTCGGAAAGGTTTGGAGGCTTGAGGAAGCTGGTGGATCTATTATTGGTGGAACAATTAAGACCATTCAAGAGAGAGGAAAGAACCCAAAGCCTGAAAGAGATCCAAGACTTCCAAAGCCTAAGGGTCAGACCGTGGCTTCTTTTAGAAAGGGATTGGCAATGCTTCCAAATGCTATTACTTCTAGGCTTGGTTCAAAGGTTAAGTTGTCTTGGAAGTTGACTTCAATTACAAAGTCAGATTCTAAGGGTTATGTGCTTGTTTACGAGACTCCAGAAGGAATTGTGTCTGTTCAAGCAAAGTCAGTGATTATGACAATCCCTTCTTATGTTGCTTCAGATATTTTGAGGCCACTTTCTTCAGATGCTGCAGATGCTCTTTCTAGGTTCTATTACCCACCTGTGGCTGCAGTGACTGTTTCATACCCTAAGGAAGCTATTAGGAAGGAATGTTTGATTGATGGAGAGCTTCAAGGTTTTGGACAGCTTCATCCAAGGTCTCAGGGTGTTGAAACCTTGGGAACTATCTATTCTTCTTCTCTTTTCCCAAACAGGGCACCTGCTGGTAGAGTGCTTTTGCTTAACTACATTGGTGGAGCTACCAATACTGGAATTGTTTCAAAGTCTGAGTCAGAATTGGTGGAAGCAGTTGATAGGGATTTGAGAAAGATGCTTATTAATCCAAGGGCTGTTGATCCTTATGTTTTGGGTGTGAGAGTTTGGCCACAAGCAATTCCTCAGTTTCTTGTGGGACACTTGGATATTCTTGATGCTGCAAAGTCTGCTCTTAACAGGTCAGGATACGATGGATTGTTCCTTGGTGGAAATTACGTGGCAGGTGTTGCTTTGGGAAGATGCGTTGAGGGAGCATACGAATCTGCTTCACAAATTTCTGATTTTCTTACAAAGTATGCTTACAAG

SEQ ID NO: 800 - DNA, 20 bp, synthetic construct
  source 1..20: mol_type = other DNA
  misc_feature 1..20: note = Synthetically generated oligonucleotide
atggtcgccacgcccgcaat

SEQ ID NO: 801 - DNA, 22 bp, synthetic construct
  source 1..22: mol_type = other DNA
  misc_feature 1..22: note = Synthetically generated oligonucleotide
cttgtaggcgtacttggtcaag

SEQ ID NO: 802 - DNA, 20 bp, synthetic construct
  source 1..20: mol_type = other DNA
  misc_feature 1..20: note = Synthetically generated oligonucleotide
atggcgggctccgacgacac

SEQ ID NO: 803 - DNA, 23 bp, synthetic construct
  source 1..23: mol_type = other DNA
  misc_feature 1..23: note = Synthetically generated oligonucleotide
atgtgaactgtcatgctttgtgc

SEQ ID NO: 804 - protein, 529 aa, Eleusine indica; identical to SEQ ID NO: 795

SEQ ID NO: 805 - protein, 529 aa, Eleusine indica
MVATPAMAAAAPPLRAPRFHARHRRRSVRCAVASDATEAPAAPGARLSADCVVVGGGISGLCTAQALATKHGIGDVLVTEARARPGGNITTVERPDEGYLWEEGPNSFQPSDPVLTMAVDSGLKEDLVFGDPNAPRFVLWEGKLRPVPSKPADLPFFDLMSIPGKLRAGLGALGIRPPPPGREESVEEFVRRNLGAEVFERLIEPFCSGVYTGDPSKLSMKAAFGKVWRLEEAGGSIIGGTIKTIQERGKNPKPERDPRLPKPKGQTVASFRKGLAMLPNAITSRLGSKVKLSWKLTSITKSDSKGYVLVYETPEGIVSVQAKSVIMTIPSYVASDILRPLSSDAADALSRFYYPPVAAVTVSYPKEAIRKECLIDGELQGFGQLHPRSQGVETLGTIYSSSLFPNRAPAGRVLLLNYIGGATNTGIVSKSESELVEAVDRDLRKMLINPRAVDPYVLGVRVWPQAIPQFLVGHLDILDAAKSALNRSGYDGLFLGGNYVAGVALGRCVEGAYESASQISDFLTKYAYK

SEQ ID NO: 806 - protein, 529 aa, Eleusine indica
MVATPAMAAAAPPLRAPRFHARHRRRSVRCAVASDATEAPAAPGARLSADCVVVGGGISGLCTAQALATKHGIGDVLVTEARARPGGNITTVERPDEGYLWEEGPNSFQPSDPVLTMAVDSGLKEDLVFGDPNAPRFVLWEGKLRPVPSKPADLPFFDLMSIPGKLRAGLGALGIRPPPPGREESVEEFVRRNLGAEVFERLIEPFCSGVYTGDPSKLSMKAAFGKVWRLEEAGGSIIGGTIKTIQERGKNPKPERDPRLPKPKGQTVASFRKGLAMLPNAIASRLGSKVKLSWKLTSITKSDSKGYVLVYETPEGIVSVQAKSVIMTIPSYVASDILRPLSSDAADALSRFYYPPVAAVTVSYPMEAIRKECLIDGELQGFGQLHPRSQGVETLGTIYSSSLFPNRAPAGRVLLLNYIGGATNTGIVSKSESELVEAVDRDLRKMLINPRAVDPYVLGVRVWPQAIPQFLVGHLDILDAAKSALNRSGYDGLFLGGNYVAGVALGRCVEGAYESASQISDFLTKYAYK

SEQ ID NO: 807 - protein, 550 aa, Amaranthus tuberculatus; identical to SEQ ID NO: 623

SEQ ID NO: 808 - protein, 535 aa, Setaria italica
MVAAAMATAPSAGVPPLRGTRGPARFRIRGVSVRCAAVAGGAAEAPASAGARVSADCVVVGGGISGLCTAQALATKHGVGDVLVTEARARPGGNITTVERPDEGYLWEEGPNSFQPSDPVLTMAVDSGLKDDLVFGDPNAPRFVLWEGKLRPVPSKPADLPFFDLMSIPGKLRAGFGALGIRPPPPGREESVEEFVRRNLGAEVFERLIEPFCSGVYAGDPSKLSMKAAFGKVWRLEEAGGSIIGGTIKTIQERGKNPKPPRDPRLPTPKGQTVASFRKGLAMLPNAITSSLGSKVKLSWKLTSITKSDGMGYVLVYETPEGVVSVQAKSVIMTIPSYVASDILRPLSSDAADALSRFYYPPVAAVTISYPKEAIRKECLIDGELQGFGQLHPRSQGVETLGTIYSSSLFPNRAPAGRVLLLNYIGGATNTGIVSKSASELVEAVDRDLRKMLINPSAVDPLVLGVRVWPQAIPQFLVGHLDLLEAAKSSLDRGGYDGLFLGGNYVAGVALGRCVEGAYESASQISDFLTKYAYK

SEQ ID NO: 809 - protein, 536 aa, Sorghum bicolor
MVAAAAMATAASAAAPLLNGTRRPARLRRRGLRVRCAAVAGGAAEAPASTGARLSADCVVVGGGISGLCTAQALATRHGVGEVLVTEARARPGGNITTVERPEEGYLWEEGPNSFQPSDPVLSMAVDSGLKDDLVFGDPNAPRFVLWEGKLRPVPSKPADLPFFDLMSIPGKLRAGLGALGIRPPPPGREESVEEFVRRNLGAEVFERLIEPFCSGVYAGDPSKLSMKAAFGKVWRLEEAGGSIIGGTIKTIQERGKNPKPPRDPRLPKPKGQTVASFRKGLAMLPNAITSSLGSKVKLSWKLTSITKSDGKGYVLEYETPEGVVLVQAKSVIMTIPSYVASDILRPLSGDAADALSRFYYPPVAAVTVSYPKEAIRKECLIDGELQGFGQLHPRSQGVETLGTIYSSSLFPNRAPAGRVLLLNYIGGATNTGIVSKTESELVEAVDRDLRKMLINSTAVDPLVLGVRVWPQAIPQFLVGHLDLLEVAKSALDQGGYDGLFLGGNYVAGVALGRCIEGAYESAAQIYDFLTKYAYK

SEQ ID NO: 810 - protein, 537 aa, Arabidopsis thaliana
MELSLLRPTTQSLLPSFSKPNLRLNVYKPLRLRCSVAGGPTVGSSKIEGGGGTTITTDCVIVGGGISGLCIAQALATKHPDAAPNLIVTEAKDRVGGNIITREENGFLWEEGPNSFQPSDPMLTMVVDSGLKDDLVLGDPTAPRFVLWNGKLRPVPSKLTDLPFFDLMSIGGKIRAGFGALGIRPSPPGREESVEEFVRRNLGDEVFERLIEPFCSGVYAGDPSKLSMKAAFGKVWKLEQNGGSIIGGTFKAIQERKNAPKAERDPRLPKPQGQTVGSFRKGLRMLPEAISARLGSKVKLSWKLSGITKLESGGYNLTYETPDGLVSVQSKSVVMTVPSHVASGLLRPLSESAANALSKLYYPPVAAVSISYPKEAIRTECLIDGELKGFGQLHPRTQGVETLGTIYSSSLFPNRAPPGRILLLNYIGGSTNTGILSKSEGELVEAVDRDLRKMLIKPNSTDPLKLGVRVWPQAIPQFLVGHFDILDTAKSSLTSSGYEGLFLGGNYVAGVALGRCVEGAYETAIEVNNFMSRYAYK

SEQ ID NO: 811 - protein, 548 aa, Nicotiana tabacum
MTTTPIANHPNIFTHQSSSSPLAFLNRTSFIPFSSISKRNSVNCNGWRTRCSVAKDYTVPSSAVDGGPAAELDCVIVGAGISGLCIAQVMSANYPNLMVTEARDRAGGNITTVERDGYLWEEGPNSFQPSDPMLTMAVDCGLKDDLVLGDPNAPRFVLWKGKLRPVPSKLTDLAFFDLMSIPGKLRAGFGAIGLRPSPPGHEESVEQFVRRNLGGEVFERLIEPFCSGVYAGDPSKLSMKAAFGKVWKLEETGGSIIGGTFKAIKERSSTPKAPRDPRLPKPKGQTVGSFRKGLRMLPDAISARLGSKLKLSWKLSSITKSEKGGYHLTYETPEGVVSLQSRSIVMTVPSYVASNILRPLSVAAADALSNFYYPPVGAVTISYPQEAIRDERLVDGELKGFGQLHPRTQGVETLGTIYSSSLFPNRAPKGRVLLLNYIGGAKNPEILSKTESQLVEVVDRDLRKMLIKPKAQDPLVVGVRVWPQAIPQFLVGHLDTLSTAKAAMNDNGLEGLFLGGNYVSGVALGRCVEGAYEVASEVTGFLSRYAYK

SEQ ID NO: 812 - protein, 511 aa, Eleusine indica
MAGSDDTRAAPARSVAVVGAGVSGLAAAYRLRKSGVNVTVFEAGDRAGGKIRSNSEGGFLWDEGANTMTESELEVSRLIDDLGLQDRQQYPNSQHKRYIVKDGAPVLIPSDPISLIKSSVLSTKSKFALFLEPFIYKKTSTRNSGIVSDEHLSESVGSFFERHFGQEVVDYLIDPFVAGTSGGDPESLSIRHAFPALWNLEKKYGSIIAGAILSKLTAKRDPVKKTSDSSGKRRNRRVSFSFLGGMQSLIDALHNEVGDGNVKLSTEVLSLACSVDGVPASGGWSISIDSKNTGSKEFGKKQTFDAVIMTAPLSNVQKMKFMKGGAPFVLDFLPKVDYLPLSLMVTAYKKEDVKRPLEGFGVLIPYKEQQKHGLKTLGTLFSSMMFPDRAPSDQFLYTTFIGGSHNRDLAGAPTTILKQLVTSDLRKLLGVEGQPTFVKHVYWRNAFPLYGRDYNSVLEAIEKMEKNLPGFFYAGNNKDGLAVGSVIASGSKAADLAISYLESRTKHDSSH

SEQ ID NO: 813 - protein, 511 aa, Eleusine indica; identical to SEQ ID NO: 797

SEQ ID NO: 814 - protein, 511 aa, Eleusine indica; identical to SEQ ID NO: 812

SEQ ID NO: 815 - protein, 533 aa, Amaranthus tuberculatus; identical to SEQ ID NO: 3

SEQ ID NO: 816 - protein, 534 aa, Amaranthus tuberculatus; identical to SEQ ID NO: 1

SEQ ID NO: 817 - protein, 535 aa, Amaranthus palmeri
MLIQSITHLSPKLALPSPLSISAKNYPVAVMGNISEREEPTSAKRVAVVGAGVSGLAAAYKLKSHGLSVTLFEADSRAGGKLKTVKKDGFIWDEGANTMTESEAEVSSLIDDLGLREKQQLPISQNKRYIARDGLPVLLPSNPAALLTSNFLSAKSKLQIMLEPFLWKKRNATELSDEHVQESVGEFFERHFGKEFVDYVIDPFVAGTCGGDPQSLSMHHTFPDVWNVEKRFGSVFAGLIQSTLLSKKEKGGGENASIKKPRVRGSFSFHGGMQTLVDTMCKQLGEDELKLQCEVLSLSYNQKGIPSLGNWSVSSMSNNTSEDQSYDAVVVTAPIRNVKEMKIMKFGNPFSLDFIPEVTYVPLSVMITAFKKDKVKRPLEGFGVLIPSKEQHNGLKTLGTLFSSMMFPDRAPSDMCLFTTFVGGSRNRKLAKASTDELKQIVSSDLQQLLGTEDEPSFVNHLFWSNAFPLYGHNYDSVLRAIDKMEKDLPGFFYAGNHKGGLSVGKAMASGCKAAELVISYLDSHLYVKMDEKTA

SEQ ID NO: 818 - protein, 544 aa, Sorghum bicolor; identical to SEQ ID NO: 28

SEQ ID NO: 819 - protein, 542 aa, Setaria italica; identical to SEQ ID NO: 27

SEQ ID NO: 820 - protein, 507 aa, Solanum tuberosum
MVPMAPSAGEDKQNCPKRVAVIGAGVSGLAAAYKLKIHGLDVTVFEAEGRAGGKLRSLSQDGLIWDEGANTMTESEGDVTFLLDSLGLREKQQFPLSQNKRYIARNGTPTLIPSNPIDLIKSNFLSTGSKLQMLFEPLLWKNKKLTKVADEHESVSGFFQRHFGKEVVDYLIDPFVAGTCGGDPDSLSMHLSFPELWNLEKRFGSVIVGAIRSKLSPIKEKKQGPPKTSVNKKRQRGSFSFLGGMQTLTDAICNDLKEDELRLNSRVLELSCSCSGDSATDSWSIFSASPHKRQAEEESFDAVIMTAPLCDVKGMKIAKRGNPFLLNFIPEVDYVPLSVVITTFKKESVKHPLEGFGVLVPSEEQKHGLKTLGTLFSSMMFPDRAPNNVYLYTTFVGGSRNRELAKASRTELKEIVTSDLKQLLGAEGEPTYVNHVCWSKAFPLYGHNYDSVLDAIDKMEKNLPGLFYAGNHKGGLSVGKALSSGCNAADLVISYLEAVSTDTKNHS

SEQ ID NO: 821 - DNA, 65 bp, synthetic construct
  source 1..65: mol_type = other DNA
  misc_feature 1..65: note = Synthetically generated oligonucleotide
gcagccttcatactgagttttgaaggatcaccagcatagacaccttatgttaacattgaaactgt

SEQ ID NO: 822 - DNA, 53 bp, synthetic construct
  source 1..53: mol_type = other DNA
  misc_feature 1..53: note = Synthetically generated oligonucleotide
gcagccttcatactgagttttgaaggatcaccagtatagacaccttatgttaa

SEQ ID NO: 823 - DNA, 39 bp, synthetic construct
  source 1..39: mol_type = other DNA
  misc_feature 1..39: note = Synthetically generated oligonucleotide
gcagccttcatactgagttttgaaggatcaccagtatag

SEQ ID NO: 824 - DNA, 39 bp, synthetic construct; identical to SEQ ID NO: 823
  source 1..39: mol_type = other DNA
  misc_feature 1..39: note = Synthetically generated oligonucleotide

SEQ ID NO: 825 - DNA, 39 bp, synthetic construct; identical to SEQ ID NO: 823
  source 1..39: mol_type = other DNA
  misc_feature 1..39: note = Synthetically generated oligonucleotide

SEQ ID NO: 826 - DNA, 38 bp, synthetic construct
  source 1..38: mol_type = other DNA
  misc_feature 1..38: note = Synthetically generated oligonucleotide
gcagccttcatactgagttttgaaggatcaccagtata

SEQ ID NO: 827 - DNA, 41 bp, synthetic construct
  source 1..41: mol_type = other DNA
  misc_feature 1..41: note = Synthetically generated oligonucleotide
gcagccttcatactgagttttgaaggatcaccagtatagac

SEQ ID NO: 828 - DNA, 41 bp, synthetic construct; identical to SEQ ID NO: 827
  source 1..41: mol_type = other DNA
  misc_feature 1..41: note = Synthetically generated oligonucleotide

SEQ ID NO: 829 - DNA, 41 bp, synthetic construct; identical to SEQ ID NO: 827
  source 1..41: mol_type = other DNA
  misc_feature 1..41: note = Synthetically generated oligonucleotide

SEQ ID NO: 830 - DNA, 42 bp, synthetic construct
  source 1..42: mol_type = other DNA
  misc_feature 1..42: note = Synthetically generated oligonucleotide
gcagccttcatactgagttttgaaggatcaccagtatagaca

SEQ ID NO: 831 - DNA, 42 bp, synthetic construct; identical to SEQ ID NO: 830
  source 1..42: mol_type = other DNA
  misc_feature 1..42: note = Synthetically generated oligonucleotide

SEQ ID NO: 832 - DNA, 42 bp, synthetic construct; identical to SEQ ID NO: 830
  source 1..42: mol_type = other DNA
  misc_feature 1..42: note = Synthetically generated oligonucleotide

SEQ ID NO: 833 - DNA, 42 bp, synthetic construct; identical to SEQ ID NO: 830
  source 1..42: mol_type = other DNA
  misc_feature 1..42: note = Synthetically generated oligonucleotide

SEQ ID NO: 834 - DNA, 45 bp, synthetic construct
  source 1..45: mol_type = other DNA
  misc_feature 1..45: note = Synthetically generated oligonucleotide
gcagccttcatactgagttttgaaggatcaccagtatagacacct

SEQ ID NO: 835 - DNA, 42 bp, synthetic construct; identical to SEQ ID NO: 830
  source 1..42: mol_type = other DNA
  misc_feature 1..42: note = Synthetically generated oligonucleotide

SEQ ID NO: 836 - DNA, 42 bp, synthetic construct; identical to SEQ ID NO: 830
  source 1..42: mol_type = other DNA
  misc_feature 1..42: note = Synthetically generated oligonucleotide

SEQ ID NO: 837 - DNA, 46 bp, synthetic construct
  source 1..46: mol_type = other DNA
  misc_feature 1..46: note = Synthetically generated oligonucleotide
gcagccttcatactgagttttgaaggatcaccagtatagacacccg

SEQ ID NO: 838 - DNA, 46 bp, synthetic construct
  source 1..46: mol_type = other DNA
  misc_feature 1..46: note = Synthetically generated oligonucleotide
gcagccttcatactgagttttgaaggatcaccagtatagacacctg

SEQ ID NO: 839 - DNA, 46 bp, synthetic construct; identical to SEQ ID NO: 838
  source 1..46: mol_type = other DNA
  misc_feature 1..46: note = Synthetically generated oligonucleotide

SEQ ID NO: 840 - DNA, 46 bp, synthetic construct; identical to SEQ ID NO: 838
  source 1..46: mol_type = other DNA
  misc_feature 1..46: note = Synthetically generated oligonucleotide

SEQ ID NO: 841 - DNA, 44 bp, synthetic construct
  source 1..44: mol_type = other DNA
  misc_feature 1..44: note = Synthetically generated oligonucleotide
gcagccttcatactgagttttgaaggatcaccagtatagacacc

SEQ ID NO: 842 - DNA, 46 bp, synthetic construct; identical to SEQ ID NO: 838
  source 1..46: mol_type = other DNA
  misc_feature 1..46: note = Synthetically generated oligonucleotide

SEQ ID NO: 843 - DNA, 48 bp, synthetic construct
  source 1..48: mol_type = other DNA
  misc_feature 1..48: note = Synthetically generated oligonucleotide
gcagccttcatactgagttttgaaggatcaccagtatagacacctgag

SEQ ID NO: 844 - DNA, 48 bp, synthetic construct; identical to SEQ ID NO: 843
  source 1..48: mol_type = other DNA
  misc_feature 1..48: note = Synthetically generated oligonucleotide

SEQ ID NO: 845 - DNA, 48 bp, synthetic construct; identical to SEQ ID NO: 843
  source 1..48: mol_type = other DNA
  misc_feature 1..48: note = Synthetically generated oligonucleotide

SEQ ID NO: 846 - DNA, 48 bp, synthetic construct; identical to SEQ ID NO: 843
  source 1..48: mol_type = other DNA
  misc_feature 1..48: note = Synthetically generated oligonucleotide

SEQ ID NO: 847 - DNA, 47 bp, synthetic construct
  source 1..47: mol_type = other DNA
  misc_feature 1..47: note = Synthetically generated oligonucleotide
gcagccttcatactgagttttgaaggatcaccagtatagacacctga

SEQ ID NO: 848 - DNA, 49 bp, synthetic construct
  source 1..49: mol_type = other DNA
  misc_feature 1..49: note = Synthetically generated oligonucleotide
gcagccttcatactgagttttgaaggatcaccagtatagacacctgagc

SEQ ID NO: 849 - DNA, 49 bp, synthetic construct; identical to SEQ ID NO: 848
  source 1..49: mol_type = other DNA
  misc_feature 1..49: note = Synthetically generated oligonucleotide

SEQ ID NO: 850 - DNA, 50 bp, synthetic construct
  source 1..50: mol_type = other DNA
  misc_feature 1..50: note = Synthetically generated oligonucleotide
gcagccttcatactgagttttgaaggatcaccagtatagacacctgagca

SEQ ID NO: 851 - DNA, 50 bp, synthetic construct; identical to SEQ ID NO: 850
  source 1..50: mol_type = other DNA
  misc_feature 1..50: note = Synthetically generated oligonucleotide

SEQ ID NO: 852 - DNA, 40 bp, synthetic construct
  source 1..40: mol_type = other DNA
  misc_feature 1..40: note = Synthetically generated oligonucleotide
tgctggtgatccttcaaaactcagtatgaaggctgcattt

SEQ ID NO: 853 - protein, 13 aa, synthetic construct
  REGION 1..13: note = Synthetically generated peptide
AGDPSKLSMKAAF

SEQ ID NO: 854 - DNA, 40 bp, synthetic construct
  source 1..40: mol_type = other DNA
  misc_feature 1..40: note = Synthetically generated oligonucleotide
tactggtgatccttcaaaactcagtatgaaggctgcattt

SEQ ID NO: 855 - protein, 13 aa, synthetic construct
  REGION 1..13: note = Synthetically generated peptide
TGDPSKLSMKAAF

SEQ ID NO: 856 - DNA, 40 bp, synthetic construct; identical to SEQ ID NO: 854
  source 1..40: mol_type = other DNA
  misc_feature 1..40: note = Synthetically generated oligonucleotide

SEQ ID NO: 857 - protein, 13 aa, synthetic construct
  REGION 1..13: note = Synthetically generated peptide
TGDPSKLSMKAAF

SEQ ID NO: 858 - protein, 59 aa, Eleusine indica
LIEPFCSGVYAGDPSKLSMKAAFGKVWRLEEAGGSIIGGTIKTIQERGKNPKPERDPRL

SEQ ID NO: 859 - protein, 59 aa, Eleusine indica
LIEPFCSGVYTGDPSKLSMKAAFGKVWRLEEAGGSIIGGTIKTIQERGKNPKPERDPRL

SEQ ID NO: 860 - protein, 59 aa, Eleusine indica; identical to SEQ ID NO: 859

SEQ ID NO: 861 - protein, 59 aa, Arabidopsis thaliana
LIEPFCSGVYAGDPSKLSMKAAFGKVWKLEQNGGSIIGGTFKAIQERKNAPKAERDPRL

SEQ ID NO: 862 - protein, 59 aa, Nicotiana tabacum
LIEPFCSGVYAGDPSKLSMKAAFGKVWKLEETGGSIIGGTFKAIKERSSTPKAPRDPRL

SEQ ID NO: 863 - protein, 59 aa, Sorghum bicolor
LIEPFCSGVYAGDPSKLSMKAAFGKVWRLEEAGGSIIGGTIKTIQERGKNPKPPRDPRL

SEQ ID NO: 864 - protein, 59 aa, Setaria italica; identical to SEQ ID NO: 863

SEQ ID NO: 865 - protein, 59 aa, Oryza sativa
LIEPFCSGVYAGDPSKLSMKAAFGKVWRLEDTGGSIIGGTIKTIQERGKNPKPPRDPRL

SEQ ID NO: 866 - protein, 59 aa, Brachypodium distachyon
LIEPFCSGVYAGDPSKLSMRAAFGKVWRLEEIGGSIIGGTIKAIQDRGKNPKPPRDPRL

SEQ ID NO: 867 - protein, 60 aa, Sorghum bicolor
LIDPFVAGTSAGDPESLSICHAFPALWNLERKYGSVVVGAILSKLTAKGDPVKTRRDSSA

SEQ ID NO: 868 - protein, 60 aa, Zea mays
FVDPFVAGTSAGDPESLSIRHAFPALWNLERKYGSVIVGAILSKLAAKGDPVKTRHDSSG

SEQ ID NO: 869 - protein, 60 aa, Setaria italica
LIDPFVAGTSAGDPESLSIRHAFPALWNLERKYHSIIVGAILSKLTAKGDPVKTGSDLSG

SEQ ID NO: 870 - protein, 60 aa, Eleusine indica
LIDPFVAGTSGGDPESLSIRHAFPALWNLEKKYGSVIAGAILSKLTAKRDPVKKTSDSSG

SEQ ID NO: 871 - protein, 60 aa, Eleusine indica; identical to SEQ ID NO: 870

SEQ ID NO: 872 - protein, 60 aa, Eleusine indica
LIDPFVAGTSGGDPESLSIRHAFPALWNLEKKYGSIIAGAILSKLTAKRDPVKKTSDSSG

SEQ ID NO: 873 - protein, 59 aa, Amaranthus palmeri
VIDPFVAGTCGGDPQSLSMHHTFPDVWNVEKRFGSVFAGLIQSTLLSKKEKGGGENASI

SEQ ID NO: 874 - protein, 57 aa, Amaranthus tuberculatus
VIDPFVAGTCGDPQSLSMHHTFPEVWNIEKRFGSVFAGLIQSTLLSKKEKGGENASI

SEQ ID NO: 875 - protein, 60 aa, Solanum tuberosum
LIDPFVAGTCGGDPDSLSMHLSFPELWNLEKRFGSVIVGAIRSKLSPIKEKKQGPPKTSV

SEQ ID NO: 876 - protein, 60 aa, Glycine max
LIDPFVGGTSAADPESLSMRHSFPELWNLEKRFGSIIAGALQSKLFAKREKTGENRTALR

SEQ ID NO: 877 - protein, 60 aa, Arabidopsis thaliana
LIDPFVGGTSAADPDSLSMKHSFPDLWNVEKSFGSIIVGAIRTKFAAKGGKSRDTKSSPG

SEQ ID NO: 878 - protein, 60 aa, Nicotiana tabacum
LIDPFVAGTCGGDPDSLSMHHSFPELWNLEKRFGSVILGAIRSKLSPKNEKKQGPPKTSA

SEQ ID NO: 879 - protein, 502 aa, Glycine max; identical to SEQ ID NO: 11

SEQ ID NO: 880 - protein, 478 aa, Arabidopsis thaliana; identical to SEQ ID NO: 290

SEQ ID NO: 881 - protein, 504 aa, Nicotiana tabacum; identical to SEQ ID NO: 20

SEQ ID NO: 882 - protein, 467 aa, synthetic construct
  REGION 1..467: note = PPO of Thermosynechococcus elongatus PKUAC-SCTE542 (comprising GenBank No. CP032152.1)
MSEVDVAIVGGGLSGLSLAWRLQQSAPQYSVVLLEASDRLGGNITTQTAEGFVWELGPNSFAPTPALLQLIAEVGLQSELIRGDRHLPRYIYWRGQLYPLQPTRPLALATSNLLSPWGKVRAALGALGFVPPYLGSGDESVNSFFRRHLGQEVAERLVAPFVSGVYAGDPQQLSAAAAFRRIAQLEKLGGGLIAGALHLRRQQAPKPKPPTSVQMRPGELGSFKEGLAALPRAIAQQLKAPIHLQTPVQEITPDPKGGYLLRSGEQTWRARSVVLATPAYQTAELVAPFQPAIARVLATIPYPTVACVVLAYPAGLGRSVRPGFGVLIPRSQGIRTLGTIWSSCLFPQRTPAGWQVFTSFIGGATDPDLASLSEEAIVQQVQQDLNRLLDLPAAKARLLGMKVWRRAIPQYMVGYPEQWQQVTHALSQTPGLFLCSNYAEGVALGDRVEHGNRTAAAVAAYLSGGQP

SEQ ID NO: 883 - protein, 465 aa, synthetic construct
  REGION 1..465: note = PPO of Cyanobacteria bacterium J003 (GenBank: RMH63851.1)
MMEVDVAIVGGGLSGLSVAWRLQQSAPQYSGVLLEASDRLGGNITTQGAEGFVWELGPNSFAPTPALLQLIAEVGLHSELIRGDRHLPRYIYWRGELYPLEPTRPLALATSNLLSPWGKVRAALGALGFVPPYLGSGDESVNSFFRRHLGQEVAERLVAPFVSGVYAGDPQQLSAAAAFRRIAQLEKLGGGLIAGALRLRRQQPPKPRPPAEVQMRPGELGSFKEGLAALPRAIAQQLKAPVHLQTPVEAITPEPNGGYLLRSGEQTWQARSVVLATPAYQTAALVAPFQPAIARVLAAIPYPTVACVVLAYPAGLGRSVRPGFGVLIPRGQGIRTLGTIWSSCLFPQRTPAGWQVFTSFIGGATDPDLASLREEAIVQQVQQDLTRLLDLPAAKARLLGMKVWRRAIPQYLVGYPQQWQQVTHALSHTPGLFLCSNYAEGVALGDRVEHGNRTAAAVAAYLSGG

SEQ ID NO: 884 - protein, 467 aa, synthetic construct
  REGION 1..467: note = PPO of Thermosynechococcus vulcanus NIES-2134 (BAY51976)
MIEVDVAIVGGGLSGLSVAWRLQRSAPHYSGVLLEASDRLGGNITTQAAEGFVWELGPNSFAPTPALLQLIAEVGLHSELIRGDRHLPRYIYWRGELYPLEPTRPLALATSNLLSPWGKVRAALGALGFVPPYLGSGDESVDSFFRRHLGQEVAERLVAPFVSGVYAGDPQQLSAAAAFRRIAQLEKLGGSLIAGALRLRRQQPPQPKPPAQVQMRPGELGSFREGLAALPRAIAQQLKAPLHLQTPVEAITPEPKGGYLLRSGEQTWHARSVVLATPAYQSAELVAPFQPAIARALATIPYPTVACVVLAYPAGLGRSVRPGFGVLVPRGQGIRTLGTIWSSCLFPQRTPAGWQVFTSFIGGATDPDLASLREEAIVEQVQQDLTRLLDLPAAKARLLGMKVWRRAIPQYIVGYPQQWQQLTHALTQTPGLFLCSNYAEGVALGDRVEHGNRTAAAVAAYLAGGQS

SEQ ID NO: 885 - protein, 476 aa, synthetic construct
  REGION 1..476: note = PPO of Synechococcus lividus (WP_099798264)
MSEPIVVDVAVVGAGLSGLSVAWRLQQVAPQYKVVVLEASDRLGGNITTEARDGFVWELGPNSFAPTPALLHLIAEVGLQDQLLRGDRRLPRYIYWRGKLHPLEPTRPLALATSGLLSPWGKLRAALGAFGFVPPYLRDADESVSSFFQRHLGKEVAERLVAPFVSGVYAGDPQQLSAAAAFRRIVQLEQLGGALIPGALRLRRQQPPKPTPPKGLEMRPGELGSFQEGLSALPRAIAHHLAAPIHLQTALHQLTPELSGGYTLSATTPDGEQAWRARSVVLATPAYVTADLLRPWQPTIAAGLEAIPYPAVACVVLAYPAAVGVTARPGFGVLIPRTQGLRTLGTIWSSCLFPERTPSGWQVFTSFIGGATDPELATLEPEAIVQQVQQDLEHMLALPPAKARLLGMKLWRRAIPQYTLGYPQQWQQITHALKHLPGLFLCSNYAAGVALGDRVEHGYNTAAAVDAYLGGTYGSV

SEQ ID NO: 886 - protein, 484 aa, synthetic construct
  REGION 1..484: note = PPO of Microcoleaceae bacterium UBA10368 (HBK97224)
MTNVVDTLIVGAGISGLSLAHALQKQAKTAPPLKILVAESQGRVGGNITTQTDGGFLWEEGPNSFAPTPELMKLAVDVGLKQELIFADRKLPRYVYWQGKLQPVPMTPQAMIQSQLLSFPGKLRALVGALGFVGPAMGSQLSQQGGEETVSQFFRRHLGTEVMQRLVEPFVSGVYAGDPQQLSAAAAFGRVTQMADVGGGLVAGALLSARKRPKKLPVDPNIPQTKPGELGSFKQGLKALPEAIAAQLGDRLKLNWHLTRLQRTERQTYIAEFATPDGQQQVEARTVVLTTPAYITAELLAPLQPEVSSALQAVTYPTVACVVLAYPLSDVKGKLVGFGNLIPRGQGIRTLGTIWTSSLFPDRAPAGWQTLSNYIGGATDSDIANLDPEQIVGEVHRDLSRILLKPLAAQPKVLAVNLWKRAIPQYNLGHLPRLQQVENGLKSLPGVYLCSNYVGGVALGDCVRWGFERAIEVSEYLQETGHRA

SEQ ID NO: 887 - protein, 476 aa, synthetic construct
  REGION 1..476: note = PPO of Microcoleaceae bacterium UBA11344 (HAT14741.1)
MTNIVDTLIVGAGISGLSLAHALQKQAKTAPPLKILVAESRGRVGGNITTXXEEGPNSFMPTPELMKLAVDVGLKQELIFADRKLPRYIYWQGKLQPVPMTPQAMIQSQLLSFPGKLRALFGALGFVGSAMGSQLSQQGGEETVSQFFRRHLGTEVMQRLVEPFVSGVYAGDPQQLSAAAAFGRVTQMADVGGGLVAGALLSARKRPKKLPVDPNIPQTKPGELGSFKQGLKALPEAIAAQLGDRLKLNWHLTRLQRTERQTYIAEFATPDGQQQVEARTVVLTTPAYITAELLAPLQPEVSSALQAVTYPTVACVVLAYPLSDVKGKLVGFGNLIPRGQGIRTLGTIWTSSLFPDRAPAGWQTLSNYIGGATDSDIANLDPEQIVGEVHRDLSRMLLKPLVAQPKVLAVNLWKRAIPQYNLGHIQRLQQVENGLKSLPGVYLCSNYVGGIALGDCVRWGFERAIEVSEYLQETGR

SEQ ID NO: 888 - protein, 491 aa, synthetic construct
  REGION 1..491: note = PPO of Oscillatoriales cyanobacterium (TAE85894)
MEVLDTLIVGAGISGLSLAHALQKEARIASPRAILVAESQGRVGGNITTATGEGFLWEEGPNSFSPTPELLKLAVDVGLKQELIFADRKLPRYVYWDKKLQPVPMTPGAMIQSGLLSFPGKLRALFGALGFVAPAMGSQLSQQGDEETVSQFFRRHLGKEVMQRLVEPFVSGVYAGDPQQLSAAAAFGRVTKMADAGGSLVAGALLSARKKKPQPPLGKGGLNALADPNIPKTKRGELGSFKGGLKALPEAIAASLGDRVKLNWHLTRLDRTERETYIAVFSTPDGQQEIEARTVVLTTPAYVTAELLQPLQPSVSSALQAFTYPTVASVVLAYPMSDVKGKLVGFGNLIPRGQGIRTLGTIWTSSLFPDRAPAGWQTLTSYIGGATDSGIGNLDAEQIVGEVHRDLSRILLKPEAAQPKVLTVKLWKRAIPQYNLGYFDRLQQIDRGLKSLPGLYLCSNYLGGVALGDCVRRGFERAQEVGEYLNDSFEF

SEQ ID NO: 889 - protein, 467 aa, synthetic construct
  REGION 1..467: note = PPO of Cyanobacteria bacterium UBA8156 (HAN47127.1)
MDDRQGEPTEVLVVGAGICGLTVAHGLAQRGVACRVVEASDRVGGAIVTRREHGFQWEEGPNSFSPTPELLALAIAMGLRDELILADRRLPRYVWWQNRLQAVPMAPPGLLTTGLLSPWGKLRAAVGALGFVPPSFAADETVGSFFRRHLGPEVLTRLAAPFVSGVYAGDPEALSIGAAFPRVTAIEAMGGGLVAGFIQALRQRGAPDPHLPQTKPGELGSFREGIEALPRAIAADLAQRGVTLTLNQALTRLEPTGDRWRAVLASGEELEARSVVLAVPAWAAAKILQQTPETADWVADLERIPYPAVACAVLAYPDGDLRQPLRGFGHLVPRGQGIRTLGTIWASSLFPGRAPAGYTLLLNFIGGTTDPTLAQLDAGAIAQAVHQDLRQILVQPTAAPPKVLAVNLWRRAIPQFTVGHQGRLARLAAGLPPGLVLAGNYRGGVALGDCVRHGLAVAAQVAAFLER

SEQ ID NO: 890 - protein, 469 aa, synthetic construct
  REGION 1..469: note = PPO of Rubidibacter lacunae (WP_022605844)
MLDTLVVGAGLSGLSVARSLQMAGRNVLVAEAQERVGGNILTQQSDDGFQWEEGPNSFSPNRELLELAVGVGLRDKLIFADRRLPRFVYWRNSLHPVPMSPPRAVTTSLLSPLGKLRAVAGAIGFVPPALSDEESVAEFFTRHLGSEVAERLVAPFVSGVYAGDVERLSVSSAFRQVAKLSEVGGGLLAGALLTRRGKSGPPQKLPPRVDPNLPRVQRGELGSFVGGLKMLPEAIAAKLGTKLKLHWTLEHLVRCEGGYRAEFATPEGQQQIEVRSLVLATPAYRCARVLQSLAPSACQALSEMPYPAVACVVLAYPSSAFSSPLQGFGNLIPRGQGIRTLGTIWSSALFPGRTPPGWEILTSFIGGATDPELGTLSAQQIVAEVRRDLQRVLVDKEPNTEPRVLAAKVWPRAIPQYVLGHSDRLNRIQIDLDRLPGLYLCSNFTDGVALGDCVRRGFETAEAIGQYLN

SEQ ID NO: 891 - protein, 471 aa, synthetic construct
  REGION 1..471: note = PPO of Hydrocoleum sp. CS-953 (WP_094676324)
MLKLAVDVGLKQDLIFADRKLPRYVYWNGQLXLVAESQNRVGGNITTVSQGDFIWEEGPNSFSPTPELLKLAVDVGLKQDLIFADRKLPRYVYWNGQLLPVPMGPTAMLQSKLLSDSGKLRALVGALGFVPPAVGTGLSQQGGEETVSQFFQRHLGVEVMQRLVEPFVSGVYAGDPSQLSATAAFSRVARMADIGGGLLAGAVLSAKRNPKSKVAADPNIPKTKPGELGSFRGGLEALPKAIATYLGEAVKLNWHLIGIRRTEQQTYIAEFSTPNGSEQIETRTIALSTPAYFCSELFKPLLPEIASTFDEFYYPTVACVVLAYPVSSIKAKIDGFGNLIPRGQGIRTLGTIWSSALFPGRTPPGWQVFTNFIGGATDPGISQLDSEAIVSRVHQDLGQTLLKQDAEQPKVLAVHLWSRAIPQYNLGHNSRLDQINHGLKSWPGVYLCSNYIGGVALGDCVXYIKTLGKLY

SEQ ID NO: 892 - protein, 487 aa, synthetic construct
  REGION 1..487: note = PPO of Oscillatoriales cyanobacterium (TAE55813)
MEVLDTLIVGAGISGLSLAHALQKEATSASPRAILVAESQGRVGGNITTATGEGFLWEEGPNSFSPTPELLKLAVDVGLKQELIFADRKLPRYVYWEKKLQPVPMTPGAMIQSQLLSFPGKLRALFGALGFVGPAMGSQLSQQGDEETVSQFFRRHLGKEVMQRLVEPFVSGVYAGDPQQLSAAAAFGRVTKMADAGGGLVAGALLSARKRPPQPPLTKGGLKTVADPNIPKTKPGELGSFKGGLQALPEAIAANLGDRLKLNWHLTRLDRTERDTYIAVFSTPDGQQEVEARTVVLTTPAYVTAELLEPLQPSVSSALQAFTYPTVASVVLAYPMSDLKGKLVGFGNLIPRGQGIRTLGTIWTSSLFADRAPAGWQTLTSYIGGATDSGIGNLDAEQIVGEVHRDLSQILLKPEAAQPKVLTVKIWKRAIPQYNLGHFDRLQQIDRGLKSLPGLYLCTNYFGGVALGDCVRRGFERAQEVDEYLNG

SEQ ID NO: 893 - protein, 475 aa, synthetic construct; identical to SEQ ID NO: 92
  REGION 1..475: note = PPO of Crinalium epipsammum (WP_015202233)

SEQ ID NO: 894 - protein, 487 aa, synthetic construct
  REGION 1..487: note = PPO of Oscillatoriales cyanobacterium (TAE70643)
MEVLDTLIVGAGISGLSLAHALQKEATSASPRAILVAESQGRVGGNITTATGEGFLWEEGPNSFSPTPELLKLAVDVGLKQELIFADRKLPRFVYWEKKLQPVPMTPGAMIQSQLLSFPGKLRALFGALGFVGPAMGSQLSQQGDEETVSQFFRRHLGKEVMQRLVEPFVSGVYAGDPQQLSAAAAFGRVTKMADAGGGLVAGALLSARKRPPQPPLTKGGLKTVADPNIPKTKPGELGSFKGGLQALPEAIAANLGDRLKLNWHLTRLDRTERDTYIAVFSTPDGQQEVEARTVVLTTPAYVTAELLEPLQPSVSSALQAFTYPTVASVVLAYPMSDLKGKLVGFGNLIPRGQGIRTLGTIWTSSLFADRAPAGWQTLTSYIGGATDSGIGNLDAEQIVGEVHRDLSQILLKPEAAQPKVLTVKIWKRAIPQYNLGHFDRLQQIDRGLKSLPGLYLCTNYFGGVALGDCVRRGFERAQEVDEYLNG

SEQ ID NO: 895 - protein, 487 aa, synthetic construct
  REGION 1..487: note = PPO of Oscillatoriales cyanobacterium (TAE14532)
MEVLDTLIVGAGISGLSLAHALQKEARSASPRAILVAESQGRVGGNITTATGEGFLWEEGPNSFSPTPELLKLAVDVGLKQELIFADRKLPRFVYWEKKLQPVPMTPGAMIQSQLLSFPGKLRALFGALGFVGPAMGSQLSQQGDEETVSQFFRRHLGKEVMQRLVEPFVSGVYAGDPQQLSAAAAFGRVTKMADAGGGLVAGALLSARKRPPQPPLTKGGLKTVADPNIPKTKPGELGSFKGGLKALPEAIAANLGDRLKLNWHLTRLDRTERDTYIAVFSTPDGQQEVEARTVVLTTPAYVTAELLEPLQPSVSSALQAFTYPTVASVVLAYPMSDLKGKLVGFGNLIPRGQGIRTLGTIWTSSLFADRAPAGWQTLTSYIGGATDSGIGNLDAEQIVGEVHRDLSQILLKPEAAQPKVLTVKIWKRAIPQYNLGHFDRLEQINRGLKSLPGLYLCTNYFGGVALGDCVRRGFERAQEVDEYLNG

SEQ ID NO: 896 - protein, 478 aa, synthetic construct
  REGION 1..478: note = PPO of Cyanobacteria bacterium QS_8_64_29 (PSP16006)
MLDALVVGAGISGLSLGRTLQQQQHSLLVAERQPQVGGNITTSSTGEFLWEEGPNSFSPARELLELAVDAGLREELVLADRQLPRYIYWRGRLQPVPMRPSAALKTQLLSPSGKLRALAGALGFVPPAVGEAVSQQGGEETVAQFFQRHLGREVTERLVAPFVSGVYAGDVRQLSAQAAFRRVTQLADRGGGLLPGALLGRQAAPQRPATSQTQLPQTQSGELGSFRTGLQALPNAIAERLGDALRCNWALSQLQRTERDSYLATFQTPQGPQQVEARAVVLTTPAYTSAELLRPLHARASQRLAAIPYPPVASVVLAYPQQALGGALRGFGNLNPRGQGIRTLGTIWSSALFAGRAPAGWEILTSFIGGATDPEIARLDEDRIVQAVHADLRQVLLARYVAPKVLAVRLWHRAIPQYAIGHQAQMQALEAELAELPGLFLCSNYLDGVSLGDCIRRGFERAHTVSHYLQAPAAAPAA

SEQ ID NO: 897 - protein, 479 aa, synthetic construct
  REGION 1..479: note = PPO of Lyngbya aestuarii (WP_023067908)
MTHVLDSLIVGAGISGLSLAHSLLRNPNPQLSLNILVSEHQGRVGGNITTVSQGEFLWEEGPNSFSPTPELLKLAVEVGLKSEFVFADRKLPRYVYWNSQLMPVPMSPPALLSTKLLSPGGKLRALTGALGFVRPAMGQALSQQNGEETISQFFERHLGSEVLKRLVEPFVSGVYAGDPQQLEISSAFARVARMAYSGGGLVAGAVLSRGQNKSSRSPADPSIPQTKRGELGSFRQGIGALPNAIAQQLGDQLKLNWQLTRLERTENQTYRAEFSTPDGVQQVETRTVVLTTPAYVTAEILKPLQLQVSQTLTEIPYPPVACVVLAYPVSAFKQKLTGFGNLVPRGQGIRTLGTIWTSSLFPGRAPQGWQVLTSYIGGATDPEIGELEDDQIVEAVHQDLRRILLKEDISPKVLAVHLWKRAIPQYNLGHQQRLQQVNEGLEAMPGLYLCSNYIDGVALGDCVRRSIGQANEILSFLDQ

SEQ ID NO: 898 - protein, 481 aa, synthetic construct
  REGION 1..481: note = PPO of Tychonema bourrellyi (WP_096831359)
MTNVVDSLIVGAGITGLSLAHALHKEAKTGTPVKILVAESLGRVGGNITTCTGNGFLWEEGPNSFSPTVELMKLAVDVGLKEELIFADRKLPRFVYWQNKLQPVPMTPQAMIQSQLLSFPGKLRALFGALGFVAPAMGATLSQQGGQETISQFFRRHLGTEVMQRLVEPFVSGVYAGDPEQLSAAAAFGRVTRMADLGGGLVAGALLGARKGPKKMPADPNIPKTKPGELGSFKGGLKALPEAIAAQLGDRLKLNWHLTGLHRTENKTYIAEFSTPDGPQQVETRTVVLTTPAYVTADWFQSLQPEVSTALQAFTYPTVACVVLAYPKSDVKEKMVGFGNLIPRGQGIRTLGTIWSSSLFANRAPAGWQTLTSFIGGATDSGIANLDAEQIVAQVHRDLSRILLKPDVPQPKVLAVKVWKQAIPQYNLGHFDRLEQIDRGLKSLPGVYLCSNYLGGVALGDCVRLGLERAIEVSKYLQETS

SEQ ID NO: 899 - protein, 481 aa, synthetic construct
  REGION 1..481: note = PPO of Oscillatoriales cyanobacterium (TAG91209)
MTNVVDTLIVGAGITGLSLAHALQKEAKTGTPVKILVAESLGRVGGNITTCTGNGFLWEEGPNSFSPTAELMKLAVDVGLKEELIFADRKLPRFVYWQNKLQPVPMTPQAMIQSQLLSFPGKLRALFGALGFVAPAMGATLSQQGGQETVSQFFGRHLGTEVMQRLVEPFVSGVYAGDPQQLSAAAAFGRVTRMADLGGGLVAGALLGARKAPKKMPADPNVPKTKPGELGSFKGGLKALPEAIAAQLGDRLKLNWHLTGLHRTENKTYIAEFSTPDGPQQVETRTVVLTTPAYVTADLFQSLQPEVSSALQAFTYPTVACVVLAYPKSDVKEKMVGFGNLIPRGQGIRTLGTIWTSSLFANRAPAGWQTLTSYIGGATDSGIGNLDAEQIVGEVHRDLSRILLKPNVPQPKVLAVKVWKQAIPQYNLGHFDRLERIDRGLKSLPGVYLCSNYVGGVALGDCVRLGFERAIEVSEYLQATS

SEQ ID NO: 900 - protein, 466 aa, synthetic construct
  REGION 1..466: note = PPO of Cyanobacteria bacterium SW_9_44_58 (PSO49761)
MLDTLIVGAGISGLSTAYRLHQGQRQILVAEQRDRVGGNIATEHQGEFLWEEGPNSFSPTPELLKLAVDAGLKNDFVFADRNLPRYVYWQGKLRPVPMSPPAAVKSQLLSPWGKLRALAGALGFVSPNVEGKEETVADFFTRHLGEEVAQRLVAPFVSGVYAGDVHRLSAQAAFGRVTQLADVGGGLVAGAVLSRGKRKQSSSTVTENADIPKTKSGELGSFREGLQMLPRAIASKLGESVKLNWQLNNISPHPEQGYIAAFSTPEGEQSVEAKSIVLTTPAHVTAPIIQTLSPLTSTALQDISYPPVACVILAYPDEALRFSLKGFGNLVPRNQGLRTLGTIWASTLFPGRAPQGWHILTNFIGGATDPEIAQLSEEQIIDQVHQDLQKVLLKSDTNPKPLAVHLWSKAIPQYTLGHLDRLETIRNSLKSCPGLFLCSNYLDGVSLGDCVRRGEETAQAVLDYLG

SEQ ID NO: 901 - protein, 482 aa, synthetic construct
  REGION 1..482: note = PPO of Trichodesmium erythraeum (WP_011611816)
MTEILDVLVVGAGISGLSLAHKLTKLSNNSPLKILVAESQNRVGGNITTVSQGEFLWEEGPNSFSPTPELLKLAVDVGLKEDLIFADRKLPRYVYWNGQLLPVPMSPKAMLQSQLLSNTGKLRALVGALGFVPPVVGMDLSQEGGEETVSQFFQRHLGKEVMERLVEPFVSGVYAGDPSQLSATAAFSKVARMADLGGGLLAGAVLSAQRNPKSKAAANSNIPKTKPGELGSFRRGLEVLPKAIATYLGQAVKLNWSLVGLRPTEKQTYIAEFSTPNGSQQIETRTIALSSPAYACAKLFRPLLPEIAGTLDEFYYPTVACVVLAYPVSSIKAKIDGFGNLIPRGQGIRTLGTIWSSALFSGRTPLGWQIFTNYIGGATDPEISHLDSEAIVAQVHQDLCQTLLNQNPEKPKVLAVHIWSRAIPQYNLGYSSRLAQINHGLKSWPGVYLCSNYIGGVALGDCVRRSIEVATDIYSGMGFGEL

SEQ ID NO: 902 - protein, 498 aa, synthetic construct
  REGION 1..498: note = PPO of Geitlerinema sp. PCC 9228 (WP_071516524.1)
MNAIAENGNEANEASPVWVDTLIVGGGISGLSVAHALVNCDRSVDNILLAESQPRVGGSVTSASSEGFLYEEGPNSFSPTPELLQLAVDVGLKDELILADRRLPRYVYWQGRLIALPNSPPSAVTSPILSPVGKLRALLGALGFVPPHVTSEPESVSDFIRRHLGPEVLQKLVEPFTSGVYAGNPDELEAASAFARIARLEKVGGSLVAGAILSRRQAPTQKKNRDRNLPKTQRGQLGSFQRGLQSLPEAIAGKLGSRVRVNWQAKSIGKTEGGNYLVEFATPQGHQQVEARSLVLATPAYVTANLLKSYPHVNSQQQQAIQALESIPYPPVACVVLGYPSSAFKKQPLHGFGNLIPRGQGIRTLGTIWGSSLFPGRAPEGWELLLNFIGGTTDPEIANLDQEQIAQLVHRDLCQTLLREDKQPKVLQVHLWKQAIPQYTIGHGSRLAAIDAGVRSLPGLFLCSNYSDGVAMGDCARRGYELAPRVAEYLQPGSYKFV

SEQ ID NO: 903 - protein, 496 aa, synthetic construct
  REGION 1..496: note = PPO of Oscillatoriales cyanobacterium (TAD79992.1)
MVVATPGAVESSVARSNPIDLLIVGAGLTGLSAAQRFVRQSPGRSCLVVEAQDRVGGNITTRSGNGFLWEEGPNSFAPTPELLQLAVEVGLKDQLVFADGKLPRFVYWDGRLQAIPMSPGAFWNSTLLSDRGKARLLLGAAGFVPPILGATVQARGGEETVREFFTRHLGQETMERMVDPFISGVYAGDPDALSASAAFRKMAAMQAAGGGLAAGAIRTLLAKRRAAKTAPPADPNLPKPKSGELGSFREGLQMLPEAVAKELGDRVKLGWRVEAIARSSNGDYTVDLATPDGPRQITTRAIVLATPAPATANLLQPLAPAASAALHAIPYPAVACVILAYPETAFAQSLRGFGNLIPRSLGLQTLGTIWASSLFAGRAPQGWAHLINFIGGAQNPGLINKTEAEIADIVHGDVRRILLKEDVAPKVLSVKLWRRAIPQYTIGHADRLATLHRELAAWPGLFPCSNYEGGVALGDCVRHGWDQAAEVDRYLAQLPV

SEQ ID NO: 904 - protein, 481 aa, synthetic construct
  REGION 1..481: note = PPO of Oscillatoriales cyanobacterium (TAD82603.1)
MTNRVDTLIVGAGITGLSLAHALHKEAKTGEPLKILVAESQGRVGGNITTSTGHGFLWEEGPNSFSPTPELMKLAVDVGLKQELMFADRQLPRFVYWQNKLQPVPMTPGAMIQSGLLSFPGKLRALFGALGFVAPVMGATLSQQGEEETVSQFFRRHLGTEVMQRLVEPFVSGVYAGDPQQLSAAAAFGRVTKMADAGGGLVAGALLSARKRPKKMPPDPNIPQTKPGELGSFKGGLMALPEAIAASLGDRLKLNWHLTGLHRTENKTYIAEFSTPHGPQQIETRTVVLTTPAYVAADLLQSLQPEVSSTLQGFTYPTVACVVLAYPLSDVKGKLVGFGNLIPRGQGIRTLGTIWTSSLFADRAPAGWQTLTSYIGGATDSGIGNLDPEEIVAEVHRDLSRILLKPNVPQPKVLAVKLWKQAIPQYNLGHLDRLQQIDRGLKSLPGMYLCSNYVGGVALGDCVRLGLEKAIAVSKYLQETS

SEQ ID NO: 905 - protein, 481 aa, synthetic construct
  REGION 1..481: note = PPO of Oscillatoriales cyanobacterium (TAD95528.1)
MTNRVDTLIVGAGITGLSLAHALHKEAKTGEPLKILVAESQGRVGGNITTSTGHGFLWEEGPNSFSPTPELMKLAVDVGLKQELMFADRQLPRFVYWQNKLQPVPMTPGAMIQSGLLSFPGKLRALFGALGFVAPVMGATLSQQGEEETVSQFFRRHLGTEVMQRLVEPFVSGVYAGDPQQLSAAAAFGRVTKMADAGGGLVAGALLSARKRPKKMPPDPNIPQTKPGELGSFKGGLMALPEAIAASLGDRLKLNWHLTGLHRTENKTYIAQFSTPDGPQQIETRTVVLTTPAYVAADLLQSLQPEVSSTLQGFTYPTVACVVLAYPLSDVKGKLVGFGNLIPRGQGIRTLGTIWTSSLFADRAPAGWQTLTSYIGGATDSGIGNLDPEEIVAEVHRDLSRILLKPNVPQPKVLAVKLWKQAIPQYNLGHLDRLQQIDRGLKSLPGMYLCSNYVGGVALGDCVRLGLEKAIAVSKYLQETS

SEQ ID NO: 906 - protein, 479 aa, synthetic construct
  REGION 1..479: note = PPO of Limnothrix sp. PR1529 (WP_099534595.1)
MDVLIVGAGLTGLSAAHRLVNHPGNRGRSTLVVEAQNRVGGNITTRSADGFLWEEGPNSFAPTPELLKLAVEVGLKDELVFADGKLPRFVYWDGRLQAIPMSPGAFWNSTLLSDRGKARLLLGAAGFVPPIVGAAISARGGEETVREFFTRHLGQEAMERLVDPFISGVYAGDPNALSASAAFRKMAAMQAAGGGLGAGAARILWAKRQAAKQAPPADPRLPKPKSGELGSFREGLQALPEAVASGLGDRVKLGWQVEAIARDPQGVYQVAIASPDGPQQITARSIILATPAPVTAQLLEPLAPRASTALNAIPYPAVACVILAYPETAFSQSLRGFGNLIPRSLGLQTLGTIWASSLFAGRAPQGWAHLINFIGGAQNPTLIHKTEDEIAQMVHADVRRILLKQDVPPKVLSVKLWRRAIPQYTIGHGSRLATLHQELQHWPGLFACSNYEGGVALGDCVRHGWEQADAIEQFLGSRV

SEQ ID NO: 907 - protein, 490 aa, synthetic construct
  REGION 1..490: note = PPO of Planktothricoides sp. SR001 (WP_054468037.1)
MNSTDLANPSTTLDTLIVGAGITGLSLAQALQQDRKRGRQSGQILLTESQERVGGRIVTQSQDGFLWEEGPNSCLPTPEFLKLAVDVGLKDELVLADRRLPRYVYLQGELIPVPMSPPAFFQTKLLSDWGKLRAIAGALGFVPPAIGATLSAQGDEETVAQFFGRHLGQEVLERLVQPFVSGVYAGDPNQLSASAAFGKVTKMADIGGGLAAGAILSLAKNGRAKKTVDPSLPKVQRGELASFRQGLEALPKAIAAQLGDVVKLGWHLIQIKPTEHQTYLAEFSTPQGPARIETRSMVLTTPSYVSADLLANLCPVASQGLAKIPYPAVACVVLGYPESAFKTSVSSGFGNLIPRGQGIRTLGTIWSSSLFPNRAPAGWRLLLNFIGGTTDLAIAQLSQEEIVQIVHRDLQKTLLKQDIPPKVLAVHLWKRAIPQYPLGHHQNLAQIHHSLQQRPGLFLCGNYTDGVAVGDCIRRGQECAADVVKYLDQG

SEQ ID NO: 908 - protein, 479 aa, synthetic construct
  REGION 1..479: note = PPO of Limnothrix sp. CACIAM 69d (RFP59749.1)
MDVLIVGAGLTGLSAAHRLVNHPGNRGRSTLVVEAQNRVGGNITTRSADGFLWEEGPNSFAPTPELLKLSVEVGLQDELVFADGKLPRFVYWDGRLQAIPMSPGAFWNSTLLSDRGKARLLLGAAGFVPPIVGAAISARGGEETVREFFTRHLGQEAMERLVDPFISGVYAGDPNALSASAAFRKMAAMQAAGGGLGAGAARILWAKRQAAKQAPPADPRLPKPKSGELGSFREGLQALPEAVASGLGDRVKLGWQVEAIARDPQGTYQVTIASPDGPQRITARSIILATPAPVTAQLLEPLAPRASTALNAIPYPAVACVILAYPETAFAQSLRGFGNLIPRSLGLQTLGTIWASSLFAGRAPQGWAHLINFIGGAQNPTLIHKTEDEIAQMVHADVRQILLKQDVPPKVLSVKLWRRAIPQYTIGHGSRLATLHQELQHWPGLFACSNYEGGVALGDCVRHGWEQADAIEQFLGSRV

SEQ ID NO: 909 - protein, 478 aa, synthetic construct
  REGION 1..478: note = PPO of Okeania hirsute (WP_124155207.1)
MTEVLDVLVVGAGISGLSLAHALTKLGNNSPLKILVAESQNRVGGNITTVSLGDFLWEEGPNSFSPTPEFLKLAVDVGLKQELVFADRKLPRYVYWNGQLLPVPMSPTAMLQSKLLSDAGKLRALVGALGFVSPAIGNLSGQGGEETVSQFFQRHLGPEVMQRLVEPFVSGVYAGDPSQLSASAAFAKVARMADLGGGLVAGALLSAKKNRKFKVAPDPNIPKTKTGELGSFRGGLEALPKAIASYLGEAVKLNWHLTNIRRTEQQTYIAEFSTPNGPEQIETRTISLSTPARVCAELFKTLQPEIASIFNEFYYPPVACVVLAYPDTSIKVKIDGFGNLIPRGQGIRTLGSIWSSTLFSGRTPPGWQIFTNFIGGATDPEIANLDSEAIVQQVHQDLCQTLLKQNAEQPKVLAVHLWSRAIPQYNLGHNSKLEEINNGLKSLPGLYLCSNYIGGIALGDCVRRGTEVATEIYQGLQT

SEQ ID NO: 910 - protein, 478 aa, synthetic construct
  REGION 1..478: note = PPO of Okeania hirsute (WP_124145785.1)
MTEVLDVLVVGAGISGLSLAHALTKLGNNSPLKILVAESQNRVGGNITTVSLGDFLWEEGPNSFSPTPEFLKLAVDVGLKEELIFADRKLPRYVYWNGQLLPVPMSPKAMLQSKLLSDGGKLRALVGALGFVSPAIGDLSEQGGEETVSQFFQRHLGAEVMQRLVEPFVSGVYAGDPGQLSANAAFAKVARMADLGGGLVAGALLSAKKNRKFKVAPDPNIPKTKTGELGSFRGGLEALPKAIASYLGEAVKLNWHLTGIRRTEQQTYIAEFSTPNGTEQIETRTISLSTPARVCSELFTTLQPEIASIFNEFYYPTVACVVLAYPDTSIKVKIDGFGNLIPRGQGIRTLGSIWSSTLFSGRTPPGWQIFTNFIGGATDPEIANLDSEAIVQQVHQDLCQTLLKQNAEQPKVLAVHLWSRAIPQYNLGHNSKLEEINNGLKSLPGLYLCSNYIGGIALGDCVRSGTEVATKIYQGLQV

SEQ ID NO: 911 - protein, 490 aa, synthetic construct
  REGION 1..490: note = PPO of Desertifilum sp. IPPAS B-1220 (WP_069967861.1)
MSFTDLATPSHPLDTLVIGAGISGLSLAFTLQQRQTQVLVCESQNRIGGNITTGQADGFLWEEGPNSFAPTPALLRLIVDAGLEKDMILADRRLPRFVYRQGRLQAIPMSPPAAIGTPLLSWPGKLRAGLGAIGFVRPPLGEQFSQQGSEETVAQFFQRHLGEEVMERLVTPFVSGVYAGDVNQLSAAAAFRRIAQLEGVGGGLVAGAILSRMKAKSQPQVPVDPSLPKTRPGELGSFQQGLQMLPQALAAKLGDAVRLNWRLLQITPTTRQSYIAEFGTPEGTQIVEARHVVLTTPAYITAEIVEAIAPLASQALRAIEYPPVANVVLAYPESALKQPLKGFGHLIPRSEGIRTLGTIWSSSLFPGRVPPGWQLLTNYIGGATDPGILDLDRDSRSNLDGNPIAQAVHQDIRRILLQQEVQPKVLAVHLWKRAIPQYNLGHHQRLQTIFQSLAPFPGLHICSNYTDGVALGDCVRRAQELADILTQKTR

SEQ ID NO: 912 - protein, 489 aa, synthetic construct
  REGION 1..489: note = PPO of Synechococcus sp. 65AY6Li (PIK93057.1)
MEAAVNPATPEPLNAEVVVIGAGISGLTLAWRLQQGLSARGGSPQAVLLAEASSRVGGCISTQSKDGYCWEEGPNSFTPTPALLNLIAEVGLTDQLVLADAKLPRYIYWEKELLPVPLSPAAALSSRLLSVGGKLRALQGLLGFVPPPPGREETVRQFFRRQLGSEVAERLVEPFTSGVYAGDPDQLSAVAAFPRVAGLEERYGSLFAGALQALRQRPQPSPAAIQPPPKRGQLGNLRQGLQQLPEALAQKLGDSLRLGWRAVQLKREGELYWVGFETPEGSRWVAARQVVLALPAYEAAALLQELNPPASQLLAEILYPPVAVVALAYPQEALPQPLRGFGHLIPRSQGLRTLGTIWASCLFPERAPQGYHSFLSFLGGATDAALARRRGIPPIPALSPEERAQIAHAELSQVLLTRRVEPIYLGERLWPRAIPQYTLGHRQRIAQVQAHLASQTPGIWVCANYLDGVALGDCVRRAEALAQQLLSQV

SEQ ID NO: 913 - protein, 489 aa, synthetic construct
  REGION 1..489: note = PPO of Synechococcus sp. 65AY6A5 (PIK88626.1)
MEAAVNPATPEPLNAEVVVIGAGISGLTLAWRLQQGLSARGGSPQAVLLAEASSRVGGCISTQSKDGYRWEEGPNSFTPTPALLNLIAEVGLTDQLVLADAKLPRYIYWEGALLPVPLSPAAALGSRLLSVGGKLRALQGLLGFVPPPPGREETVRQFFRRQLGSEVAERLVEPFTSGVYAGDPDQLSAVAAFPRVAGLEERYGSLFAGALQALRQRPQPSPAAIQPPPKRGQLGNLRQGLQQLPEALAQKLGDSLRLGWRALQLKRAGELYWVGFETPEGSRWVAARQVVLALPAYEAAALLQELNPPASQLLAEILYPPVAVVALAYPQEALPQPLRGFGHLIPRSQGLRTLGTIWASCLFPERAPQGYHSFLSFLGGATDAALARQQGIPPIPALSPEERAQIAHAELSQVLLTRRAEPVYLGERLWPRAIPQYTLGHRQRIAQVQAHLASQTPGIWVCANYLDGVALGDCVRRAEALAQQLLSQV

SEQ ID NO: 914 - protein, 489 aa, synthetic construct
  REGION 1..489: note = PPO of Synechococcus sp. 60AY4M2 (PIK94415.1)
MEAAVNPATPEPLNAEVVVIGAGISGLTLAWRLQQGLSARGGSPQAVLLAEASSRVGGCISTQSKDGYRWEEGPNSFTPTPALLNLIAEVGLADQLVLADAKLPRYIYWEGALLPVPLSPAAALGSRLLSVGGKLRALQGLLGFVPPPPGREETVRQFFRRQLGSEVAERLVEPFTSGVYAGDPDQLSAVAAFPRVAGLEERYGSLFAGALQALRQRPQPSPAAIQPPPKRGQLGNLRQGLQQLPEALAQKLGDSLRLGWRALQLKRAGELYWVGFETPEGSRWVAARQVVLALPAYEAAALLQELNPPASQLLAEILYPPVAVVALAYPQEALPQPLRGFGHLIPRSQGLRTLGTIWASCLFPERAPQGYHSFLSFLGGATDAALARQQGIPPIPALSPEERAQIAHAELSQVLLTRRAEPVYLGERLWPRAIPQYTLGHRQRIAQVQAHLASQTPGIWVCANYLDGVALGDCVRRAEALAQQLFSQV

SEQ ID NO: 915 - protein, 489 aa, synthetic construct
  REGION 1..489: note = PPO of Synechococcus sp. 63AY4M1 (PIK96673.1)
MEAAVNPATPEPLNAEVVVIGAGISGLTLAWRLQQGLSARGGSPQAVLLAEASSRVGGCISTQSKDGYRWEEGPNSFTPTPALLNLIAEVGLADQLVLADAKLPRYIYWEGALLPVPLSPAAALGSRLLSVGGKLRALQGLLGFVPPPPGREETVRQFFRRQLGSEVAERLVEPFTSGVYAGDPDQLSAVAAFPRVAGLEERYGSLFAGALQALRQRPQPSPAAIQPPPKRGQLGNLRQGLQQLPEALAQKLGDSLRLGWRALQLKRAGELYWVGFETPEGSRWVAARQVVLALPAYEAAALLQELNPPASQLLAEILYPPVAVVALAYPQEALPQPLRGFGHLIPRSQGLRTLGTIWASCLFPERAPQGYHSFLSFLGGATDAALARRRGIPPIPALSPEERAQIAHAELSQVLLTRRAEPVYLGERLWPRAIPQYTLGHRQRIAQVQAHLASQTPGIWVCANYLDGVALGDCVRRAEALAQQLFSQV

SEQ ID NO: 916 - protein, 489 aa, synthetic construct
  REGION 1..489: note = PPO of Synechococcus sp. 63AY4M2 (PIK85371.1)
MEAAVNPATPEPLNAEVVVIGAGISGLTLAWRLQQGLSARGGSPQAVLLAEASSRVGGCISTQSKDGYRWEEGPNSFTPTPALLNLIAEVGLTDQLVLADAKLPRYIYWEGALLPVPLSPAAALGSRLLSVGGKLRALQGLLGFVPPPPGREETVRQFFRRQLGSEVAERLVEPFTSGVYAGDPDQLSAVAAFPRVAGLEERYGSLFAGALQALRQRPQPSPAAIQPPPKRGQLGNLRQGLQQLPEALAQKLGDSLRLGWRALQLKRAGELYWVGFETPEGSRWVAARQVVLALPAYEAAALLQELNPPASQLLAEILYPPVAVVALAYPQEALPQPLRGFGHLIPRSQGLRTLGTIWASCLFPERAPQGYHSFLSFLGGATDAALARRRGIPPIPALSPEERAQIAHAELSQVLLTRRAEPVYLGERLWPRAIPQYTLGHRQRIAQVQAHLASQTPGIWVCANYLDGVALGDCVRRAEALAQQLFSQV

SEQ ID NO: 917 - protein, 485 aa, synthetic construct
  REGION 1..485: note = PPO of Cyanobacteria bacterium J007 (RMH78328.1)
MSEPANPSTLLDTLVVGAGITGLTLAFDLQQKSSGTAHSAKVLVAESQARVGGRIVTASGDGFLWEEGPNSFAPTPELLQLAVEVGLKDKLVFADGKLPRFVYWQGELMPVPMSPPAIISSKLLTWRGKLRAFFGALGFVPPAMADVGSEETVASFFERHLGREVLQRLVEPFVSGVYAGDPRQLSARAAFGRVARMAEAGGGLVAGAVRTSRQKPKTKVTPDPNVPQPKRGQLGSFRQGLATLPEAIADRLGDAVQLNWHLIRVRPTERHTYIAEFSTPDGPKRVEARSVVLTTPTYVTADLFDPLHGEIARALRGFVYPSVACVVLGYPTSALKRPLNGFGNLIPRNQGIRTLGTIWSSSLFSGRAPEGWNLLINFIGGTGDPAIAELEKDEIVRVVHRDLLKTLLARDVDPKVLAVHLWKRAIPQYCLGHHQRWEQIDRGLQEFPGLYLCGNYSDGVAVGDCVRRARDRAAEIRQYLASATV

SEQ ID NO: 918 - protein, 468 aa, synthetic construct
  REGION 1..468: note = PPO of Spirulina major (WP_072619201.1)
MLDSLIVGAGLSGLTVAHTLQQRDRNILVAEASPDVGGNIISRQQGEFLWEEGPNSFQPNPTLLKLAVDVGLKDDLVFADRKLPRWVYWQGRLLAVPMSPGTAVRSPLLSVPGKLRALFGALGFVPPLVGSHIQAQGGDETIWQFINRHLGPEVAERLISPFVSGVYAGDVHALSMAAAFRKIYRLETLGGGLVAGAMRSRRQGKADRPAVDPNLPTTKPGQLGSFREGMVMLPNAIAARLGDRLRCRWTLTQIEPLEQGYRAHFDTPDGGQTIETRTLVLAIPAHRVAPLLAPLMPELSTTLQAIPYPAVACTVMAYPKTALVRSLHGFGNLNPRSQGIRTLGTIWSSTLFPGRAPEGWVMLSSFIGGSTDPAVATMDEGAIAQAVHQDLSNILVKPDSTPKVLAVKLWSKAIPQYTLGHCDRLSVMAEHLKAHPHLTLCSNYTDGVALGDCIRRGIEAGEAIDQQL

SEQ ID NO: 919 - protein, 463 aa, synthetic construct
  REGION 1..463: note = PPO of Euhalothece sp. KZN 001 (PNW65677.1)
MVETLIVGAGISGLTTAYRLHEQQHEVMVAEKNDRAGGNITSKASGGFLWEEGPNSFSPTPELLKLAVDVGLKDEFVFADPTLPRYVYWQGKLLPVPMSPPSAVKSQLLSPLGKLRALTGAIGFVPPKVATEEETVAEFFTRHLGSEVAQRLVSPFVSGVYAGDVANLSASAAFGRVTQLADVGGGLVAGAILSRGKKKKATTEVDPEIPKTRSGELGSFREGLQQLPSSIARKLGEAVKFNWELKQISQTSEAGYIATFSTPEGEQNVEAQQIILTTPAYVSAPILQDLSPEASQALREIYYPPVACVVLAYPDEAFSVPLDGFGNLNPRSEGVRTLGTIWSSTLFSGRTPQGWQILTNFIGGATDPEIAQLSEEEIVQQVHQDLQKTIVKPNTTPKPLAVHLWSQAIPQYTLGHLDRIARIKESLKPFSGLFLSSNYLDGVALGDCVRRGEETAAQILNKK

SEQ ID NO: 920 - protein, 461 aa, synthetic construct
  REGION 1..461: note = PPO of Dactylococcopsis salina (WP_015230904.1)
MVETLIVGAGISGLTTAYRLHEQQHEVMVAEKNDRAGGNITSKASGGFLWEEGPNSFSPTPELLKLAVDVGLKDEFVFADPTLPRYVYWQGKLLPVPMSPPAAVKSQLLSPLGKLRALTGAIGFVPPKVATEEETVAEFFTRHLGSEVAQRLVSPFVSGVYAGDVANLSASAAFARVTQLADVGGGLVAGAILSRGKKKKATTEVNSEIPKTRSGELGSFREGLQQLPSSIARKLGEAVKFNWELKQISQTSEAGYIATFSTPEGEQNVEAQQIILTTPAYVNAPILQDLSPEASQALREIDYPPVACVVLAYPDEAFSVPLDGFGNLNPRSEGVRTLGTIWSSTLFSGRTPQGWQILTNFIGGATDPEIAQLSEEEIVQQVHQDLQKTIVKPNTTPKPLAVHLWSQAIPQYTLGHLDRIARIKESLKPFSGLFLSSNYLDGVALGDCVRRGEETAAQILR

SEQ ID NO: 921 - protein, 467 aa, synthetic construct
  REGION 1..467: note = PPO of Synechococcus sp. PCC 7336 (WP_017328280.1)
MGSHTPDILILGAGISGLSAAFRLHQQQQDLLVAERAERVGGVITTRAQDGFRWEEGPNSFTPSPALLNLIADAGIADRLLWADGKLPRFVYLEGKLTLVPMTPPDLIKSNLLSFGAKLRALLGILGFTAKAPDKEETVEEFFARQLGPQVVERLVGPFTSGVYAGDTQQLSATAAFSKVADLERKYGSIIAGIIRSPKSPKPPISAKIDPLPKRGQLGNFVEGLQELPDAIAQQLGDAVKLQWEAAEIVKEGDRYRTTFQTPSGPQTVSSKAILLAVPAYRAAPLLKSLDTALADELAAIPYPHVGAVTLAYPADALPQPFAGFGQLFPRGQGIRTLGTIWTSSLFPGRAPAGYQCTLSYIGGATDPDIAQMTDEALARTVHQDLSKTLLVKEAEPRVMGVRRWPRAIPQYTLGHRQRLARIDELLADYSGLVLCTNYLDGVALGDCVRRGEARAADLVEWLAQAE

SEQ ID NO: 922 - protein, 484 aa, synthetic construct
  REGION 1..484: note = PPO of Arthrospira sp. O9.13F (WP_111891435)
MTNLVDSLIVGAGISGLSLAYSLNREKSVREPLKVLVTESQNRVGGNITTGRADDFLWEEGPNSFAPTPELLGLAVDLGLKEELIFADRKLPRYVYWNLMLHPVPMNPPALLSSELISARGKLRAALGAIGFVPPPVGAHLSQQGGEETITQFFDRHLGSEVLERLVQPFVSGVYAGDPQQLAVRSAFSRIVAAEEAGGGLLPGFVRSRLNKKAPVSTPDPNIPKTRPGELGSFRYGLQTLPETLASKLGDRVKLNWTIDRFYPTDHQTYIAEFSTPDGPQQVEARTLALMTPAHVSARLLQPLHSPIATALSQIPYPPVACVVLAYPKSALKQQLKGFGNLIPRRQGIRTLGTIWTSSLFPGRAPESWQVLSNYIGGATDPEIGEMDDDQIVAAVHQDLRQILLAEDVPPKVLAVHLWRRAIPQYTLGHQNRLNCIDAGLRSXPGLYLCSNYIDGVSVGDCVRRGQQWASKIQSHLHDCQTAN

SEQ ID NO: 923 - protein, 484 aa, synthetic construct; identical to SEQ ID NO: 80
  REGION 1..484: note = PPO of Arthrospira platensis (WP_006622155)

SEQ ID NO: 924 - protein, 483 aa, synthetic construct
  REGION 1..483: note = PPO of Arthrospira platensis (WP_006617829)
MTNLVDSLIVGAGISGLSLAHSLNREKNPRSPLKVLVTESQNRVGGNITTGRASDFLWEEGPNSFAPTPELLGLAVDLGLKQELIFADRKLPRYVYWNHKLHPVPMTPPALLSSQLISPRGKLRAALGAIGFVPPPVGAHLSQQRGEETITQFFHRHLGSEVLERLVQPFVSGVYAGDPQQLAVRSAFSRLVAAEDAGGALLPGFVRSRLNKKATKDTTADPNIPKTRPGELGSFRYGLETLPETLASKLGDRVKLNWTLDRFYPTDHQTYIAEFSTPDGPQQVETRTLALMTPAHVSARLLQPLHSQIASALSQIPYPPVACVVLAYPKSALKQQLKGFGNLIPRHQGIRTLGTIWTSSLFPGRAPESWQVLSNYIGGATDPEIGEMDDDQIVAAVHQDLRQILLAEDVPPKVLAVHLWRRAIPQYTLGHQDRLNSINAGLRSLPGLYLCSNYIDGVSVGDCVRRGQQWASQIQSHLHPTAN

SEQ ID NO: 925 - protein, 478 aa, synthetic construct
  REGION 1..478: note = PPO of Pseudanabaena sp. BC1403 (WP_103669271.1)
MTITPPSENNQPIDVLVVGAGISGLTIAHELAISKKYSVLVAEAQDRVGGAITSAKNDEGYQWEEGPNSFQPAPELLRLAVQVGLKDELVLADGKLPRFVFLNGKLNALPMTPASAIASKILTWGGKIRLALGAIGFARPAMAGEESVDQFFSRLLGRQAVERLVAPFISGVYAGDPKRLSAKAAFSKIARLETYGGLIAGAILSSKQRKAEKINDPNIPKTKAGELGSFRQGIKMLPEAIATKLREQGSAIKQQWTLRSLEKQGEVYISKFDTPTGEETVTSRSIVLATPAYVTAKLLQDYLPAASQALNEIFYPTVACVVLAYPKSEFAYDMKGFGNLIPRTQGVRTLGTIWSSSLFTGRAPEGWQLLLNFIGGTLDPALAKLSEPEIIAAVHQDLKKTILRPDTKAEPKAIAVHVWDKAIPQYEIGHLERLAIVEAELQKSQGLYVSANFIGGVALGDCIKRSLQEANKIDAYLK

SEQ ID NO: 926 - protein, 478 aa, synthetic construct
  REGION 1..478: note = PPO of Pseudanabaena sp. Roaring Creek (WP_055076288)
MTSAQIPEVNPLDVLVVGAGISGLTIAHELAIAKNYRVLVAETQDRVGGAITSAKNDDGYQWEEGPNSFQPAPELLRLAVEVGLKDELVLADGKLPRFVFLNGKLNALPMSPPTAIASRILTWGGKIRLALGAMGFARPAMAGEESVDRFFSRLLGRQAVDRLVAPFISGVYAGDPKRLSAKAAFAKIAKLETYGGLLAGAILSSKERKQKLNDPRIPKTKAGELGSFREGIKMLPEAIAAKLRAQGTAVKQQWTLRSLEKQGGIYISKFDTPTGEEIVTSRSVVLSTPAYVTAKLLQDYLPAASQALNEIFYPTVACVVLAYPKSEFLYDMKGFGNLIPRTEGVRTLGTIWSSSLFSGRAPAGWQLLLNFIGGTLDPALAHLSEAEIIAAVHQDLKKTILRPDTKVSPKAIAVHVWDKAIPQYEIGHLERLATVEAELQKSSGLYVSANFIGGVALGDCIKRSLQEAHKIAAFLETI

SEQ ID NO: 927 - protein, 479 aa, synthetic construct
  REGION 1..479: note = PPO of Pseudanabaena sp.( HBC40803.1)
MTSAQTTEVNQPLDVLVVGAGISGLAIAHELAIAKNYRVLVAEAQDRVGGAITSNRNDDGYLWEEGPNSFQPAPELLRLAVEVGLKDELVLADGKLPRFVFLNGKLNALPMSPPTAIASKILTWGGKIRLALGALGFARPAMSGEESVDQFFSRLLGKQAVERLVAPFISGVYAGDPKRLSARAAFSKIFRLENGYGGLLTGAILTAKDRKAQKLNDPNIPKVKSGELGSFRQGIKMLPEAIATKLRDQGTAVKQQWTLRSLEKQGEIYVSQFGTPTGTETITSRSVVLTTPAYVSAKLLQGYLPAASQALSEIFYPTVACVVLAYPKSEFAYDMKGFGNLIPRTQGVRTLGTIWSSSLFAGRAPDGWQLLLNFIGGTLDPDLANLSEAKIVQAVHQDLKKTLLRPDSKVEPKVIAVHVWDKAIPQYEIGHLERLATIETELQKSQGLYVSANFIGGVALGDCIKRSLQEADKIAAFLK

SEQ ID NO: 928 - protein, 511 aa, synthetic construct
  REGION 1..511: note = PPO of Synechococcus sp. JA-2-3Ba(2-13) (WP_049749573)
MNSSVEHFSGTQSLQAEVVVVGAGISGLTLALRLQQGLSPKDESTQPLLLAEASSRVGGCISTQSKDSYRWEEGPNSFTPVPALLNLIAEVGLAEHLVLADAKLPRYIYWEKELLPVPLSPSAAIGSRLLSVGGKLRALRGLLGFVAPPPGGEETVRQFFRRQLGSEVVERLVEPFTSGVYAGDPDQLSALAAFPRIAGLEERYGSLFAGAVQALRSRYRYATLPRTRHQDSANSPIQPPPKRGQLGNLRQGLQQLPEAIAQKLGSALRLGWRAVHLKRDETGYRVGFVIHDSGAEHTAPEEIHWVAAQQVVLTLPAYAAATLLQDLNPQASRLLREIPYPPVAVVALAYPEEALPQPLRGFGHLIPRSQGLRTLGTIWASSLFPERAPQGYHCLISFIGGATDAAFARQKGIPPITALSPDERAQIVHAELSQILLTRPVEPIRLGERLWPQAIPQYTLGHRQRIAQLQASLADQTPGVWVCANYLDGVALGDCVRRAEALAQQILSVRR

SEQ ID NO: 929 - protein, 479 aa, synthetic construct
  REGION 1..479: note = PPO of Pseudanabaena biceps (WP_009629673)
MTSAQIPEVNPLDVLVVGAGISGLTIAHELAIAKNYRVLVAEAQDRVGGAITSAKNDEGYQWEEGPNSFQPAPELLRLAVEVGLKDELVLADGKLPRFVFLNGKLNALPMSPPTAIASQILTWGGKIRLALGAMGFARPAMAGEESVDRFFSRLLGRQAVDRLVAPFISGVYAGDPKRLSAKAAFAKIAKLETYGGLLAGAILSSKERKAQKLNDPRIPKTKAGELGSFREGIKMLPEAITAKLRAQGTAVKQQWTLQSLEKQGEIYVSKFATPTGEEIVTSRSVVLSTPAYVTAKLLQDYLPAASQALNEIFYPTVACVVLAYPKSEFRYDMKGFGNLIPRTEGVRTLGTIWSSSLFAGRAPAGWQLLLNFIGGTLDPALAHLSEAEIIAAVHQDLKKTILRPDTKVSPKAIAVHVWDKAIPQYEIGHLERLATVEAELQKSSGLYISANFIGGVALGDCIKRSLQEAHKIAAFLETI

SEQ ID NO: 930 - protein, 478 aa, synthetic construct
  REGION 1..478: note = PPO of Pseudanabaena sp. (PZV12410)
MTLTPSSEENQPLDTLIIGAGISGLTIAHELVIAKNYRILVAEAQDRVGGAITSAKNDEGYLWEEGPNSFQPAPELLRLAVQVGLKDELVLADGKLPRFVFLNGKLNALPMSPPTAITSKILTWGGKIRLALGAIGFARPAMAGEESVDQFFSRILGKQAVERLVAPFISGVYAGDPKRLSAKAAFSKIAKLETYGGLLSGAILSSKERKAQKLNEPNIPKTKAGELGSFRQGIQMLPEAIASKLRETGTAVKQKWTLRSLEKQGDIYISKFDTPSGEETVTSRSVVLTTPAYVTAKLLEDYLPAASQALNEIFYPTVACVVLAYPKSEFAHDMKGFGNLIPRTQGVRTLGTIWSSSLFAGRAPEGWQLLLNFIGGTLDPALAKLSESEIIAAVHADLKKTILRPDTKAEPKAIAVHVWDKAIPQYEIGHLDRLATVEAELQKSQGLYVSANFIGGVALGDCIKRSLQEANKIDAFLK

SEQ ID NO: 931 - protein, 502 aa, synthetic construct
  REGION 1..502: note = PPO of Pseudanabaena sp. PCC 7367 (WP_015165508)
MSNHNHAGSPIDLLVVGAGISGLTVAHDLASNSVAEANGSNQLRIIVTEAQNRVGGAIVSQRDEVGFQWEEGPNSFQPAPELLKLAAAVGLKDELVFADGKLPRFVFWNGKLNALPMSPQLLTKFNLLTIKGKLRAFLGAIGFVRPAAAGEETVAQFFKRHLGQEVVDRLVVPFISGVYAGNTDKLSAAAAFGKIFRLEKNYNGLVAGAILSRLAKRKQEKAQTNQPANIYDRQEIPKTKPGQLGSFKNGIEALPRAIAEDLIDKGHEVRLQWRLDKIQPNSDGTYSATYETPHGIETITARALLLTTPAYVSSMLLQDIAPDAAQSLGEIYYPPVACVVLGYPDAAMKRDMNGFGNLIPRSQGIRTLGTIWGSSLFSDRAPAGYHLLLNFIGGSLDTGIADLSEPEIAQAVHSDLKQTLLKPDTTIEPKVLAVHLWQRAIPQYEVGHLDRLARVERDLANHPGLFVSANFIGGVALGDCVKRSFGTAEQIKGFLNLSTKKK

SEQ ID NO: 932 - protein, 479 aa, synthetic construct
  REGION 1..479: note = PPO of Pseudanabaena sp. SR411 (WP_094530677)
MSLTPSSATNQPLDVLVVGAGISGLTIAHELAIAKKYRVLVAEAQDRVGGAITSAKNDEGYQWEEGPNSFQPAPELLRLAVQVGLKDELVLADGKLPRFVFLNGKLNALPMSPPTAIASKILTWGGKIRLALGAIGFARPAMAGEESVDQFFSRLLGKQAVERLVAPFISGVYAGDPKRLSAKAAFAKIFRLENSYNGLLAGAILSAKERKAQKLSDPNIPKVKAGELGSFRQGIKMLPEAIATKLRDQGTAVKQQWTLRSLEKQDEIYISKFDTPTGEETVRSRSVVLSTPAYVTAKLLQDYLPAASQALNEIFYPTVACVVMAYPKSEFAYDMKGFGNLIPRTQGVRTLGTIWSSSLFAGRAPEGWQLLLNFIGGTLDPALAKLSEPEIIAAVHQDLKKTILRPDTKAEPKAIAVHVWDKAIPQYEIGHLDRLATVEKELQKSQGLYISANFIGGVALGDCIKRSLQEATKIDAFLK

SEQ ID NO: 933 - protein, 483 aa, synthetic construct
  REGION 1..483: note = PPO of Pseudanabaena frigida (PZO41121)
MTTSQETKASQPLDVLVVGAGISGLTIAHELAIAKHRHVLVAEAQDRVGGAITTASNNEGYLWEEGPNSFQPAPELLRLAVEVGLKDELVLADGKLPRFVFLNGKLNALPMSPPTAIASKILSWGGKIRLALGALGFARPAMAGEESVDRFFSRLLGKQAVERLVAPFISGVYAGDPKRLSAKAAFSKIAKLETYGGLLAGAILSSKERKAQKLNDPNIPKTKAGELGSFRQGIKMLPEAIAAKLRAQGTPVKQQWTLRSLQKQDEIYIAKFDTPTGEEVVTSKSVVLSTPAYVSAKLLQDYLPAASQALSEIFYPTVACVVLAYPKSAFAYDMKGFGNLIPRTQGVRTLGTIWSSSLFAGRAPDGWQLLLNFIGGTLDPALAQLSESEIIQAVHQDLKKTILRPDTQVEPKTIAVHVWDKAIPQYEIGHLQRLATIKAELQKSQGLYISANFIGGVALGDCIKRSLQESIEIDEFLSRTNSL

SEQ ID NO: 934 - protein, 481 aa, synthetic construct
  REGION 1..481: note = PPO of Pseudanabaena sp. (PZU98053)
MNQLADRPSGEQTLDVLVVGAGISGLTIAYDLAINQHRQVLVAEAQDRVGGAIVSKQNDEGYLWEEGPNSFQPTPELLRLAVNVGLEDQLVLANGKLPRFVFLKGKLNALPMSPPAAIATPLLDWGSKIRLALGAIGFARPAMAGEESVDQFFSRLLGKQAVARLVAPFISGVYAGDPKRLSARAAFAKIFRLENNYGGLVAGAILSGKDRQAQKAKNADLPKVKAGELGSFKQGIKMLPEAIATKLRSQGTAVKQQWTLRSLDRQGDHYIAKFDTPTGEETVMSRAVVLATPAYVTANLLKDYLPSASQALRKIFYPTVACVVLAYPKTEFAYDMQGFGNLIPRTEGVRTLGTIWSSSLFAGRAPQGWQLLLNFIGGTLDPALAQLSEAEIIQAVHQDLKKTILRPDTKAEPKAIAVHRWDKAIPQYEIGHLQLLATVEAELQKSQGLYISANFIGGVALGDCIKRSLQEAIKIEQFLAK

SEQ ID NO: 935 - protein, 488 aa, synthetic construct
  REGION 1..488: note = PPO of Oscillatoriales cyanobacterium CG2_30_44_21 (OIP76421)
MPSPQSATNQSDDRPSGGQPIDVLVVGAGVSGLTIAHDLAINYQRQVLVAEAQDRVGGAIISRQNNEGYLWEEGPNSFQPAPELLRLAVNVGLEDQLVLANGKLPRFVFLKGKLNAIPMSPPAAIATPLLDWGSKIRLALGAIGFARPAMAGEESVDQFFSRLLGKQAVAHLVAPFISGVYAGDPKRLSARAAFAKIFRLENNYGGLVAGAILSGKDRQAQKAKNTDLPQVKAGELGSFKQGIKMLPEAIATKLRSQGTPVKQQWTLRSLNRQDDIYIAKFDTPTGEEIVMSRAMVMATPAYVTADLLKDYLPSASQALSKIFYPTVACVVLAYPKTEFAYDMQGFGNLIPRTEGVRTLGTIWSSSLFAGRAPQGWQLLLNFIGGTLDPALAKLSDSEIIQAVHQDLKKTILRPDTKAEPKAIAVHRWDKAIPQYEIGHLQLLATVEAELKKSQGLYISANFIGGVALGDCIKRSLQEAIKIEQFLAK

SEQ ID NO: 936 - protein, 563 aa, synthetic construct; identical to SEQ ID NO: 601
  REGION 1..563: note = PPO of Chlamydomonas reinhardtii (AF068635.1)

SEQ ID NO: 937 - protein, 565 aa, synthetic construct
  REGION 1..565: note = PPO of Volvox carteri f. nagariensis hypothetical protein (XM_002955148.1)
MLTSHATNIYANSKARLQIREIARPTVTGVSRSGVLQDVASPLPRQIPRPAQRAARPTSATATSSGVPTADSARGTKIVDNVYDVIVVGGGLSGLVTGQALSAQHGVNNFLVTEARERVGGNITSMSGDGYVWEEGPNSFQPNDSMLQVAVDAGVEKDLVLGDPKAPRFVYWQNKLRPVPSGPDALTFDLMSLPGKIRAGLGAIGLINGAMPNFEESVEQFIRRNLGDEVFERLIEPFCSGVYAGDPSKLSMKAAFNRIWILEKDGSSLVGGALKLFQERRKNPPPPRDPRLPPKPKGQTVGSFRLGLKMLPEAIERRIKDQVRVNWKLVSLTRDGDRYSLVYDTPEGRVQCYSRAVALTAPSYVVADLIKAEVPAAAEALSSFDYPPVGAVTLSYPLSAIRDDRKDAQGNVPGFGQLHPRSQGVTTLGTIYSSSLFPGRAPPGHMLLLNYIGGATNRGIVNQTQEQLVAQVDKDLRLMVLKPDAPAPRVVGVRVWPRAIPQFNIGHLELLDKARGALEAKGWNGVFLGGNYVSGVALGKVVEYGYESAAKLAKHLTAAQKQVAV

SEQ ID NO: 938 - protein, 493 aa, synthetic construct
  REGION 1..493: note = PPO of Chondrus crispus (CHC_T00000813001) (XM_005718155.1)
MAVAEGATPAPAAASATPSEVDALVIGSGISGSSLAFTLSQASPATSLLLTEARPVVGGNVISRNERGYTWEEGPNTFQPAPHIIRMAVDLGLRDDIVLADHTLPRFVYWDQRLFALPLSPNDIPTFRLLSLPGAIRAGLGAAGFVMPPPKGREESIKDFITRHLGAEVFQKMIDPFVSGVYAGDPSKLSMSAAFKKIYALQELGMTQGIVEGAIIRIQQKKKEAPPPDPELPTWKGGALGSFRKGLGMLPQAVAERLGDRVKLSWKLVSLGKESDGRYRATYETPEGTKTVIARSVAITAPANATAGILGDLAPGIKAIEEINYPTVWSITLAYPKNEFREPLSGFGNLIPRSMGIRTLGTIWSSCLFPGRAPEGMELLLSYIGGAQDAAIKELTEDEVVATVDADIKKILMKDGSEVKPVVVGARKWDRAIPQYNIGYWDIMGKAEEAVKEHPGIFLGGNYTSGVAFGDCVQWGIDTAPKVAEYVAAQAAV

SEQ ID NO: 939 - protein, 570 aa, synthetic construct
  REGION 1..570: note = PPO of Galdieria sulphuraria (XM_005708373.1)
MSSGFLCFCPNAVIKAAQYVRPKNTFSCKHYTCKNRNSWFYGNELYIKRRKVVEQQRTTSHVSKLPFRQTWKAVSAQHTEDGECSVLIIGSGVTGSTAAFQLAESGIDVLVAEKNEQVGGNIISRKEQGFIWEEGPNTFQPTPDILVMIEKLGLVDKLVLADAKLPRYVFYQDKLHKIPSSPFEACQFSLLSTRGKLRAFLGAIGFAPMNLKKKEETVRDFVTRHLGEEVYERLVDPFISGVYAGDPSKLSMKAAFKRVQALEEKGVTQSLIEGAIIRMFETKNSKGKKETKGSLKVPRGSLGSFKDGLQMYPQSVQSKLSNKVKTGWKLIRLEKSGNGSSHQSCEDYFAVFQIPNGITKVIRTKALIFTSPAYITASLLRPFIPNASDLLEQIYYPCVVSVSLAYPSSSFRFPLSGFGHLIPRSTKIRTLGTIWSSSLFPYRVPEGYHLLSSYIGGAQDTDIASLSEDQVVKQVDSDIRKILLRQDAALPKVLGVRHWNKAIPQYELGHLSRMETIQSQVSETLPGVFLGGNYVSGISFGDCVSFGMQLADQASYYIKENTELLSSTVV

SEQ ID NO: 940 - protein, 482 aa, synthetic construct
  REGION 1..482: note = PPO of Pseudanabaena sp. ABRG5-3 (WP_126386150.1)
MTSAQPTEVNQPLDVLVVGAGISGLAIAHELAIAKNYRVLVAEAQDRVGGAITSNRNDEGYLWEEGPNSFQPAPELLRLAVQVGLKDELVLADGKLPRFVFLNGKLNALPMSPPTAIASKILTWGGKIRLALGALGFARPAMSGEESVDQFFSRLLGKQAVERLVAPFISGVYAGDPKRLSARAAFSKIFRLENGYGGLLAGALLTAKERKAQKLNDPNIPKVKSGELGSFRQGIKMLPEAIATKLRDQGTAVKQQWTLRSLEKQGDIYISQFDTPTGAETITSRSVVLTTPAYVSAKLLQDYLPAASQALSEIFYPTVACVVLAYPKSEFAYDMKGFGNLIPRTQGVRTLGTIWSSSLFAGRAPDGWQLLLNFIGGTLDPALAKLSEAEIVQAVHQDLKKTILRPDTKAEPKAIAVHVWDKAIPQYEIGHLERLATIEAELQKSQGLYVSANFIGGVSLGDCIKRGLQEASKIDVFLSSQG

SEQ ID NO: 941 - protein, 483 aa, synthetic construct
  REGION 1..483: note = PPO of Arthrospira platensis YZ (WP_014277531.1)
MTNLVDSLIVGAGISGLSLAHSLNREKNPRSPLKVLVTESQNRVGGNITTGRASDFLWEEGPNSFAPTPELLGLAVDLGLKQELIFADRKLPRYVYWNHKLHPVPMTPPALLSSQLISPRGKLRAALGAIGFVPPPVGAHLSQQRGEETITQFFHRHLGSEVLERLVQPFVSGVYAGDPQQLAVRSAFSRLVAAEDAGGALLPGFVRSRLNKKTTKDTTPDPNIPKTRPGELGSFRYGLETLPETLASKLGDRVKLNWTLDRFYPTPHQTYIAEFSTPDGPQQVETRTLALMTPAHVSARLLQPLHSQIASALSQIPYPPVACVVLAYPKSALKQQLKGFGNLIPRHQGIRTLGTIWTSSLFPGRAPESWQVLSNYIGGATDPEIGEMDDDQIVAAVHQDLRQILLAEDVPPKVLAVHLWRRAIPQYTLGHQDRLNSINAGLRSLPGLYLCSNYIDGVSVGDCVRRGQQWASQIQSHLHPTAN

SEQ ID NO: 942 - protein, 469 aa, synthetic construct
  REGION 1..469: note = PPO of Gloeobacter kilaueensis JS1 (WP_023175091)
MGRMSVAAEPLDVLVVGAGLSGLALAWHLQRSGRRVLVCEATERVGGAISSELIDGFTCEGGPNSFQSTRPLQELLVELQLEERLVFAEERLARFVWWENRLRPVPMSPAQFVRADLLSWPGKLRCLSEFFVPPLSEPREETVAEFVLRRFGDEALNRLIEPFIAGVFAGDAGQLSADAALAPLVELERQAGSVLRGLWQRRNRGVLTPQRLCTLRGGIEQLPRAIARRLQSQLRFQSRLEALEPLAGGWQAIVLDGRGEAQAISARSVALAAPAWAIAPVLARLDPSLGRALESIYYPPVAAVSLGYSKSQLPNLSEGFGHLIPRGQSLRSLGVIYNSCLFRHAAPTSWRLFTCFLGGTTDPLIADLSDGELANLAHRELQAVLDFQSSYQLLRVARWPRAIPQYALGHITKQERIERYLAELPGLFLVGNYFGGISVGDCVRQARLKADSVLQFLTRTAANGRLNLA

SEQ ID NO: 943 - protein, 466 aa, synthetic construct
  REGION 1..466: note = PPO of Gloeobacter violaceus PCC 7421 (WP_011140945)
MNTAEELLDVLVVGAGLSGLALAWKLKRAGCTFLVCQAGERVGGAITTAIADGFVCEGGPNSFQESPPLIELLTQLQLEDQIVTADPRLARFVWWENRLRSVPLTPAQLVRSDLLSWSGKARLLWELFVPALGEPREETVAEFVLRRFGEEVLSRLVDPLVSGMCAGDVGQLSIEATFERLVDLERRHGGVLRGLWRTARTRPPFKRLCTLRGGLEQLPQALAQRLQPQILLSHRLEALEHLAGDRWRAVVAGPQGEPVAIAARTVILSGSAHAMASVLRPLDAGLGRALESIYYPPVVSISLAYSKSQVPNAPEGFGHLIPRNQTLRSLGVIWNSSLFPHTAPPNWRLYTCFVGGTTDPATPNLSDTELASLAHRELQTVLGFQAGYQLLRVTRWPQAIPQYALGHPSKQERVERALLGLPGLFLVGNYFGGISLGDCVRHSGAVASRVLQFLTTVASNGSLRPA

SEQ ID NO: 944 - protein, 538 aa, synthetic construct
  REGION 1..538: note = PPO of Panicum hallii var. hallii (PUZ57154.1)
MVAAAAAAMATAASAGVPPLSGPRGPARLRSRGVIVRCAAVAGGAAEAPTSTGARVSADCVVVGGGISGLCTAQALATKHGVGDVLVTEARARPGGNITTVERPEEGYLWEEGPNSFQPSDPVLTMAVDSGLKDDLVFGDPNAPRFVLWEGKLRPVPSKPADLPFFDLMSIPGKLRAGFGALGIRPPPPGREESVEEFVRRNLGAEVFERLIEPFCSGVYAGDPSKLSMKAAFGKVWRLEEAGGSIIGGTIKTIQERGKNPKPPRDPRLPKPKGQTVASFRKGLAMLPNAITSSLGSKVKLSWKLTSITKSDGKGYVLVYETPEGVVSVQAKSVIMTIPSYVASDILRPLSSDAADALSRFYYPPVAAVTISYPKEAIRKECLIDGELQGFGQLHPRSQGVETLGTIYSSSLFPNRAPAGRVLLLNYIGGATNTGIVYKSESELVEAVDRDLRKMLINPRAVDPLVLGVRVWPQAIPQFLVGHLDLLEAAKSALGRGGYDGLFLGGNYVAGVALGRCVEGAYESASQISDFLTKYAYK

SEQ ID NO: 945 - protein, 563 aa, synthetic construct
  REGION 1..563: note = PPO of Porphyra umbilicalis (OSX75961.1)
MAAFVPAAAAAPWTARRSAFAGAPAAAGSRRPAMAGAAAPLRSLVPRAIPPPGAARRAAPSPRMAAGGAPDEVVDALVVGSGVSGSTLAYRLHSRGVSMLLTEARDVVGGNVISRSANGYTWEEGPNTFQPAPHILRLAVDVGLKDDLVFADHTLPRFVYWNGNLFALPMGPADIPKFRLLSPLGAVRAGLGAAGFVWPNWSGKEESVKEFITRHLGAEVFAKMIDPFVSGVYAGDPSSLAIRGAFGKIYALQNLGITQGIVEGAIIRLRQRKAEAGEPDPELPVVKGGALGSFREGLGMLPKAVAAKLGDAVRLGWTLTELRKLPGSAPGYEAVYSTPDGPRTVHAKTVSLTAPAGAASSILGGMLPAAKALDDVYYPCVWSVTLSYPTAAFKRPLKGFGNLIPRSMGVRTLGTIWSSSLFPGRAPPGRELLLSYIGGAQDKGIADLSEEEVVAAVDGDIKALLLSEGAADEVPVVVGVRKWPRAIPQYVRGHLELVAGVREAAAAECPGLFLGGNYASGVAFGDCVAWGDKAAAEVVATLGDMPETGAPMAMPETATPASV

SEQ ID NO: 946 - protein, 533 aa, synthetic construct
  REGION 1..533: note = PPO of Ostreococcus tauri (XP_003079975.1)
MSRAQVSLAPARVADRRRVGRTRAARRAVAVRASTVERDVVIVGAGVSGLSTAFTLAKKTMPNASVMVTEARDRVGGNITSKSDGTYTWEEGPNSYQPGDAILTLACDAGMRDDILLADPASNRYVLWDGKLRILPHSIESAVLGDFLTWPGKIRAGLGAIGIRPPAPGKEESVKEFVSRNLGTEAFERLIEPFCSGVYAGDPASLSSVAATGRVQRLEPLGGSLVVGALKAQAEAAKAKKESGFKRDPRLPEVKGQTVGSFRGGLKTFPEGLAKQLGDDVVKCNWKLVNVNKAAEGGYTCEYDTPEGRRTVIAKCLLLTAPAYVTAEIVKDMAPAASTALNKFYYPPVASVTVSYKKDSFRLDGTSALPEGGLTGFGQLHPRSQGIRTLGTIYSSSLFKDDKRQPDDEFMILNYIGGARDVAIKDLSEDELVQQVHEDALKTILKPGTPLPKVVGVKLWEKAIPQFNLGHLDVLAEAENALEAAACGEKDGLFLGGNYTAGVALGRCVEFGVEQADEVATFLKSAKKLTAAV

SEQ ID NO: 947 - protein, 551 aa, synthetic construct
  REGION 1..551: note = PPO of Ectocarpus siliculosus (CBJ31610.1)
MLAAVGTAAGLLAVAGITPAYGFVTPSTAWNTARGSGHGTASRAATTMAADIFKAGPVEKVDCAVVGSGISGSTLGFYLDKKGVDCVVLEARDQVGGNVISKKEDGFLWEEGPNSFQPTPYIMRTTVDLGLKEDLVLADPTLPRFVFWEGGLFPLPSSLQSIITDFWLLSWPGKIRAGLGAIGLVLPPPSDYEESVKEFVTRHLGPEAFERLIDPFVSGVYAGDPSKLAIKAALKKVARLEVLGGPGLIDGAILRLKERARQEKELPEPLQSEDLPTYQGGSLGSFREGLQMLPNAALKAMGKDKMRTSWVMKGIKRSEDGGYLLAFDTPKGPKRLQAKVAVCTAPAHRLASVEGLRDIVPEAARLDEVYYPPVASVTLAYPKSSFKVDLTGFGNLIPRKMKIRTLGTIWSSSLFPGRAPEGYAMLLNYIGGAQDPAIKDLSDDEIVAECDRDIRTILLKDDAPPPKVLGCRLWKTAIPQYQRGHLAILEELQEGLKAAPGLRMGGNYITGVAFGDCVQYGYEEAERIEEMLKSGALDGQQSVSDKEAVAA

SEQ ID NO: 948 - protein, 473 aa, synthetic construct
  REGION 1..473: note = PPO of Nannochloropsis gaditana CCMP526 (XM_005854685.1)
MEETDVLVVGSGISGSTTAFYLNKAGVKCLLTEAKPVVGGNVISKSESGFLWEEGPNSFQPTYPLMQATVDMGLADELVLADASLPRFVYWKEKLYALPGGLGDIPFFNLLSIPGRIRAGLGALGFIRGPPKDKEESVKEFVTRHLGAETFERIIDPFVSGVYAGDPSKLSMKAALKKVKRLEELGGRGILDGALLRIQEIQRTKPPVVPEHPVYKGGQLGSFKRGLQSMPLAAAKALGKEKVRLSHKLLSVVEGKGPKGGYEAVFQTPQGRKRIKCQALAITAPAHVVHKLLRPLVPEAARLADVYYPPVASVTLAYPKTAFREPLRGFGNLIPRSMKIRTLGTIWSSSLFPGGPPDYNMLLSYIGGAQDPGIAELSSQQIVKEVDRDIKKVLLKPDAPAPKILGVRLWPTAIPQYNKGHLDILASVEAGVKKHPGLFLGGNYRTGVAFGDCVTYGMEEAGRIQSYLAAKAP

SEQ ID NO: 949 - protein, 472 aa, synthetic construct
  REGION 1..472: note = PPO of Ostreococcus lucimarinus CCE9901 (XM_001418241.1)
MKKMREATVLVTEARERVGGNVTSRSDGTYTWEEGPNSYQPGDAILTLACDAGMRDDILLADPASNRYVLWDGKLRILPHSIESAVLGDFLTWPGKIRAGLGAIGIRPPAPGKEESVKEFVSRNLGTEAFERLIEPFCSGVYAGDPAALSSVAATGRVQRLEPLGGSLVAGAIMAQKEAAQNKKPRDPRLPEVKGQTVGSFRGGLKTFPEGLAKQLGDDVVKCNWKLVGVSKSAEGGYECAYDTPEGPQTVRTKCLLLTAPAYVAAEMVKDMAPAAATALNKFYYPPVASVTISYKKDSFRLDGTSALPEGGLTGFGQLHPRSQGIRTLGTIYSSSLFKDDKRQPDDEFMILNYIGGARDVAIKDLSEEELVKQVHEDALKTILKPGTPLPKVVGVKVWEKAIPQFNLGHLDVLAEAENALTAADCGEKDGLFLGGNYTAGVALGRCVEFGIEQADEVVAYLNAASKKAVAV

SEQ ID NO: 950 - protein, 570 aa, synthetic construct
  REGION 1..570: note = PPO of Guillardia theta CCMP2712 (XM_005821253.1)
MVTMAAVRTKAWVTSPSMLSSPALLRMPSCSWTGKSSVRGARDSSVQFRGRSARFGAGVRGMQSAGGWGAGSMEKYDTLVIGSGVSGSSLGFSLFQKGVNVLVTEARDVVGGNVITREQDGFLWEEGPNTFQPTRQIMRLAVDLGLKDELVFADHTLPRCVYWEKELFPLPSKPEDAPFFRLLSIPEKIRAGIGAIGLHAPKPDYEESVKDFIERHLGEAVFKKMIDPFVSGVYAGDPTKLSMASAFKKIYALEDLGMTPSLIEGGIIRQAERAKEARENYDPELPTYKGGALGSFRKGLVSLPKAAQEKLGDRLRTSWKVESISKGEDGGYVTKFSTPQGSKEVWSKTVAVTAPAHATVGMLSELVPECKALEEIHYPCVYSVTLAYPKECLKDEVRKERPGLGKRLFGFGNLIPRSMGIRTLGTIWSSSLFPYRAPEGYEMMLSYIGGAQDPLRYNPPIAELSEEEVAKIVHGDVSKILLKEGAPEPKVLGVRKWPKAIPQYNKGYSEIMGKVNSGLSKCPGLYLGGNYVSGVAFGDCVQWGVDTAPKVKEFLDSVPSSEKAANAALV

SEQ ID NO: 951 - protein, 575 aa, synthetic construct
  REGION 1..575: note = PPO of Cyanidioschyzon merolae strain 10D (XM_005535077.1)
MLRWSGSQQVTDRNRAEQHGLVVAFAFPARAPRHSEATHERWTGLAQRERGLCVPLKATKWKRDLWHSRKLQMQEPAQRNREQVQALVVGSGVTGSSFAFLLQHAGISDVICTEARGEVGGNLISRSKDGYLWEEGPNTFQPTPVILKLARDAGLESELVFADAKLPRYVYWEGVLHALPSSPADLITGRFRLLSNAGKARAALGALGFVGAPKRVARQAGPEPSEDADLADESVEEFVTRHLGREVFLKIIDPFVSGVYAGDPSKLSMAAAFKRVYALEQLGGTRGILEGALIRLQQRRRERQRWAAENLPKVKAGALGSFREGLQQLPLTVATRLGPERMRTRYALRQIEYNGAKRGKRRYTARFETPDGERVIETDALILTIPAHAASPLLQGLGVSGSELLQEIDFPPVYSVTLAYPKFAARFPLNGFGNLIPRSAGIRTLGMVWSSSLFPERAPPDMNMVLSYIGGARDPGIRECTPDEVAALVDADMRRVLLRADAPSPQVLGVRLWPRAIPQYNRGHLRRLEACNQGLQGFPGLFLGGNYLSGVSFGDCVQWAYDNVPRVLTFLQETA

SEQ ID NO: 952 - protein, 559 aa, synthetic construct
  REGION 1..559: note = PPO of Bathycoccus prasinos (XM_007513261.1)
MTMTTGISSIGTKKNSINRAKVSSTRRTRRVRAALSSSGSKGSNFVVRASSSSSSPSDDENNSLGIKDTIIVGGGVSGLSTAFTMKSKNASCDIMVTEIRDRVGGNVTSKNDGQYIWEEGPNSYQPGDAVLKLACDAGMKEDIVLANPDSDRYVLWDGELRALPKDIPTAVLGDFLTWPGKIRAGLGAVGIRMPKEEGKEETVKEFVSRNLGEEAFQRLIEPFCSGVYAGDPAMLSAEAATGRVSVLENKGPWPGLFPGALKAQYEGAKKKKENPRDPRLPVIEGQTVGSFKGGLQTLPEGLAKQLGEGIVKLQWKLIKTEKTEDGLFSLTYETPEGEKKVKAKSVVFTQPAYVVADTVRSIAPEAAKSFEKFYYPPVASVTVAYKRDAFKLDGRSALPEGGLTGFGQLHPRTQKVRTLGTIYSSYLWADDGRCPKDEFMILNYIGGARDVEIQKLNEDELVQAVHADALKTILKPDTPLPKKVGVRMWSKAIPQFNLGHWKLLDEAKELLKKEKCSEEDGLFLGGNYVAGVAFGRCVEYGVDQASDVLNFLDKQRRTV

SEQ ID NO: 953 - protein, 471 aa, synthetic construct
  REGION 1..471: note = PPO of Myxococcus xanthus (AY916795.1)
MHHMPRTTGMNVAVVGGGISGLAVAHHLRSRGTDAVLLESSARLGGAVGTHALAGYLVEQGPNSFLDREPATRALAAALNLEGRIRAADPAAKRRYVYTRGRLRSVPASPPAFLASDILPLGARLRVAGELFSRRAPEGVDESLAAFGRRHLGHRATQVLLDAVQTGIYAGDVEQLSVAATFPMLVKMEREHRSLILGAIRAQKAQRQAALPAGTAPKLSGALSTFDGGLQVLIDALAASLGDAAHVGARVEGLAREDGGWRLIIEEHGRRAELSVAQVVLAAPAHATAKLLRPLDDALAALVAGIAYAPIAVVHLGFDAGTLPAPDGFGFLVPAEEQRRMLGAIHASTTFPFRAEGGRVLYSCMVGGARQPGLVEQDEDALAALAREELKALAGVTARPSFTRVFRWPLGIPQYNLGHLERVAAIDAALQRLPGLHLIGNAYKGVGLNDCIRNAAQLADALVAGNTSHAP

SEQ ID NO: 954 - protein, 469 aa, synthetic construct
  REGION 1..469: note = PPO of Myxococcus virescens (WP_090484749.1)
MHHMQRTHRMNVAVVGGGISGLAIAHGLRSRGTAAVLLETSARLGGAVGTHARAGYLVEQGPNSFLDREPATRELAAALNLEGRIRVADPSAKRRYVYTRGRLRSVPASPPAFLASDILPLGARLRVAGELFSRRAPEGTDESLAAFGRRHLGRAATRVLLDAVQTGIYAGDVEQLSVEATFPMLVKLEREHRSLILGAIRAQKAQRKALPAGDAPKLSGALSTFDGGLQVLIDALAASLGDTAHVSARVEGLTRVDGGWKLAVEEHGRRAELTANHVVLAVPAFVAAQLLRPLDDALAEQVSRIEYAPIAVVHLGFDAGALPAPDGFGFLVPFEEKRRLLGAIHASTTFPFRVEGGRVLYTCMVGGARQPDLVKRDEAALAALALEELQALTGVTARPTFTEVFRWPRGIPQYNVGHLARMAGIDAALQRWPGLHLAGNAYKGIGLNDCIRNAARLATALADEESVRK

SEQ ID NO: 955 - protein, 463 aa, synthetic construct
  REGION 1..463: note = PPO of Myxococcus macrosporus DSM 14697 (ATB45699.1)
MNVAVVGGGISGLAVAHGLRSRGTAAVLLETSARLGGAVGTHARAGYLVEQGPNSFLDREPATRALAAALNLEGRIRVADASAKRRYVYTRGRLRSVPASPPAFLTSDILPLGARLRVMGELFSSRAPEGTDESLAAFGRRHLGPVATRVLLDAVQTGIYAGDVERLSVEATFPLLVKLEREHRSLILGAIHAQKAQARAKALLPPGDAPKLTGALSTFDGGLQVLIDALASSLGDAAHVGARVEGLTRVDGGWRLAVEEHGQRAELSASHVVLAVPAHVAAELLQPLDDALAAQVSRIEYAPIAVVHLGFDAGTLPAPDGFGFLVPFEEQRRLLGAIHASTTFPFRVEGGRVLYTCMVGGARQPDLVQRDEAELAALALEELRALAGVTARPTFTQVFRWPRGIPQYNVGHLERMAGIDAALQRWPGLHLAGNAYKGIGLNDCIRNAARLAAALSDEENVRK

SEQ ID NO: 956 - protein, 469 aa, synthetic construct
  REGION 1..469: note = PPO of Myxococcus hansupus (WP_044889345)
MHHMPRTHGMNVAVVGGGISGLAVAHRLRSRGTDAVLLETSGRLGGAVGTHARDGYLVEQGPNSFLDREPATRELAAALNLEGRIRVADPLAKRRYVYTRGRLRSVPSSPPAFLASDILPLGARLRVAGELFSGRAPTGIDESLAEFGRRHLGRTATQVLLDAVQTGIYAGDVEQLSVAATFPMLVDLERKHRSLILGAIRAQQVQRRALSAGGTPKLSGALSTFDGGLQVLIDALATSLGDAAHVGAQVECLTRVDGGWKLMVEERGQRAELSASQVVLAVPAHVAAELLRPLDDALAAQVARIDYAPIAVVHLGFDAGTLPAPDGFGFLVPSGEKRRLLGAIHASTTFPFRVEGGRVLYTCMVGGARQPELVRQDEAALAALALEELRALAGVTAQPTFTQVYRWQRGIPQYNVGHLERMAGIDAALQRWPGLHLAGNAYKGIGLNDCIRNAARLADALTDEESVRK

SEQ ID NO: 957 - protein, 461 aa, synthetic construct
  REGION 1..461: note = PPO of Myxococcus fulvus (WP_046711394.1)
MTVAVVGGGISGLVVAWRLRSRGRDAVLLETTSRLGGAVGTRAQRGFLLETGPNSFLDREPAMRELASALNLEHRIRAADGAAKRRYVYTRGKLRSVPASPPAFLKSDILPFGAKLRVMGELFSGRAAPGVDESLADFGRRHLGATATRVLLDAVQTGIFAGDVEKLSVGATFPPLVKLEREHRSLLLGAIQAQKAQKARAKALPAGSTAPKLSGALSTFEGGLGTLIDALGTALGDAARTGATVEGLTRGDDGWRLAVSERGQRSELKASSVVLAAPAYVTRGLLEPLDAELAARVGGIDYAPIAVVHLGFDAGTTPAPDGFGFLVPPMEKRRLLGAIHASTVFPFRVEAGRVLYTCMVGGATRPDLVALDEAELVALAREELKALAGVTATPTLTEVFRWKRGIPQYNLGHLERMDGVDRALTRLPGLHLAGNAYKGVGLNDCIRNGLALADALVDAGA

SEQ ID NO: 958 - protein, 461 aa, synthetic construct
  REGION 1..461: note = PPO of Myxococcus fulvus (WP_074949681.1)
MTVAVVGGGISGLVVAWRLRSRGRDAVLLETTSRLGGAVGTRAQRGFLLETGPNSFLDREPAMRELASALNLEHRIRAADGAAKRRYVYTRGKLRSVPASPPAFLKSDILPFGAKLRVMGELFSGRAAPGVDESLADFGRRHLGATATRVLLDAVQTGIFAGDVEKLSVGATFPPLVKLEREHRSLLLGAIQAQKAQKARAKALPAGSTGPKLSGALSTFEGGLGTLIDALGTALGDAARTGATVEGLTRGDDGWRLAVSERGQRSELKASSVVLAAPAYVTRGLLEPLDAELAARVGGIDYAPIAVVHLGFDAGTTPAPDGFGFLVPPMEKRRLLGAIHASTVFPFRVEAGRVLYTCMVGGATRPDLVALDEAELVALAREELKALAGVTATPTLTEVFRWKRGIPQYNLGHLERMDGVDRALTRLPGLHLAGNAYKGVGLNDCIRNGLALADALVDAGA

SEQ ID NO: 959 - protein, 459 aa, synthetic construct
  REGION 1..459: note = PPO of Myxococcus stipitatus (WP_015346914.1)
MTVAVVGGGISGLVVAWRLRSRGKAAVVLETTSRLGGAVGTRAKQGFLLETGPNSFLDREPATRELAGALNLEHRIRAADAAAKRRYVYTRGQLRSVPASPPAFLGSDILPWSAKLRVMGELFTGRAAPGIDESLAAFGRRHLGATATRVLLDAVQTGIFAGDVERLSVGATFPPLVKLEHEHRSLILGAIRTQQARRKALPAGASAAPELSGALSTFEGGLQTLIDALSASLGEDARVNATVEGLTRVGDGWRLAVSEKGQRSELDASHVVLAAPAYVTQKLLHPLDAELAARVGGIEYAPIAVVQLGFDVGTTPAPDGFGFLVPPSEGRRLLGSIHASTVFPFRVEPGRVLYTCMVGGAKRPDLVGLDEPALVALAREELKALAGVTATPSLTEVFRWPLGIPQYNVGHLARMAAVDQALTRRPGLSLTGNAYKGVGLNDCIRNGLQLADALVTAAG

SEQ ID NO: 960 - protein, 458 aa, synthetic construct
  REGION 1..458: note = PPO of Hyalangium minutum (WP_044193071.1)
MTVIAVIGGGISGLTLTHCLRSRGKDALLLEASSRLGGNIETRQRDGFLIETGPNSFLDREPATRELAAGVGVEDRIRSADPAAKARYLYTRGRLRPVPSSPPAFLKSDILPLGARLRVMAELFTGRAPEGVDESLAAFGRRHLGPAATAVLLDAVQTGIYAGNMETLSVDATFPQLTKLEREHRSLILGAIRSQKAQRKALPAGAAGSPEKLRGTLCTFDGGLQTLVDGLARELGPAAHTNAKVEGLQPSHGGWRVSVRENGGQAELLASQVVLATPAFVAAGLMRPLDEPLAALVEGIAYAPIAVVHLGFAPGSTPAPDGFGFLVPGLEKRRLLGAIHASTVFPFRTEGGRVLYTCMVGGARQPDLVKLDEEALVALAREELKELAGVTASPSFTEVIRWTRGIPQYNVGHLERVAAIDAALKRWPGLHLTGNAYKGVGINDCIRNAFALGDALAA

SEQ ID NO: 961 - DNA, 1404 bp, synthetic construct
  source 1..1404: mol_type = other DNA
  misc_feature 1..1404: note = Gene encoding SEQ ID NO: 882
atgagtgaggtagatgtcgcaattgtcggtggtggcctcagtggcctgagtctggcttggcggttgcagcaaagcgccccccagtacagcgtggttcttttagaggccagcgatcgccttgggggcaatattacgacgcaaacagcagagggctttgtctgggaactaggtcccaatagttttgcaccgacccccgccctgttgcaactcattgctgaggtgggcttgcagtcggaactcattcggggcgatcgccacctgccgcgctacatctactggcggggacaactctaccccctacaacccacccgtcctcttgccttagccacctcaaacctcctcagtccttggggaaaagtgcgggcagcccttggtgcccttgggtttgtgcccccctatttaggcagcggcgatgagtcagtcaattcatttttccgtcgccatttggggcaagaggtagctgaacgactggtggcgccctttgtctctggggtttatgcgggtgatccacaacaactgagtgctgctgctgcttttcgccgtattgctcaattggaaaaacttgggggtggcctcattgctggtgccctgcacctacggcgtcaacaagcccccaaacccaagccgcctacaagtgtgcagatgcgaccgggggaacttggttcctttaaggaaggcctagccgcgctacctcgggcgatcgcccaacaactgaaggcaccgattcacctgcaaacccctgttcaagaaatcaccccagaccctaagggtgggtacctgctgcgcagtggtgagcaaacgtggcgcgcccgcagtgtggttttggcaacgcctgcctatcaaaccgcagagttagtggcaccctttcagccagcgatcgcccgtgttttggccaccattccctatcccaccgtggcctgtgtggtcttggcctatcctgctggacttgggcgcagtgtccgccccggctttggcgtactgattcctcgcagtcagggcatccgcacccttggcaccatttggtcgtcctgtctctttccccaacgcacccccgccggttggcaagtctttacgagttttattggcggtgctacggatcctgatttggcaagcctgagcgaagaagccattgttcagcaggtgcagcaggatttgaaccgactccttgatttacccgcagccaaggcacgcttactcggtatgaaggtttggcgacgggcgattccccaatatatggtgggctaccctgagcagtggcagcaggtgacccatgccctcagtcaaacccccggccttttcctgtgtagtaattatgctgagggtgtcgccttgggcgatcgcgtcgaacatggcaatcgaaccgctgctgctgttgctgcctacctttcaggaggccagccctag

SEQ ID NO: 962 - DNA, 1398 bp, synthetic construct
  source 1..1398: mol_type = other DNA
  misc_feature 1..1398: note = Gene encoding SEQ ID NO: 883
atgatggaggtagatgtcgcaattgttgggggtggtctcagtggcctgagtgttgcttggcggttgcagcagagcgccccgcagtacagtggggttcttttagaggctagcgatcgcctgggggggaatatcacgacccaaggggcggagggttttgtctgggaactgggtcccaatagctttgcacccacccctgccctcctacaactcattgctgaggtgggcttgcactcagagctaattcggggcgatcgccacctaccgcgctacatctactggcggggggaactctaccccctcgaacccacccgtccccttgctttggccacctcaaatttactcagcccttggggaaaagtgcgggcagcccttggtgccttggggtttgtgcccccctatctgggcagtggggatgagtcggttaattcatttttccgtcgccatttggggcaagaggtggctgaacgactggtggccccctttgtctctggggtttacgccggtgatccgcaacaattgagtgccgctgctgcttttcgtcgtattgcccaactggaaaaactagggggtgggctcattgccggcgccctgcgcctgcggcgccaacaacctcctaaaccaaggccacctgcagaggtgcaaatgcgaccaggggaactgggctcctttaaggaaggcttggctgctctgccgcgggcgatcgcccaacaattgaaggcaccggttcacctgcaaacccccgttgaagcaatcaccccagaacccaatggtggctatctgctgcgcagtggtgagcaaacgtggcaggcccgcagtgtggtcttggcaacgcctgcctatcaaaccgcggcgttggtagcgccctttcagccagcgatcgcccgtgttttggctgccatcccctatcccaccgtggcctgtgtggtcttggcctaccccgcgggactgggacgcagtgtacgccccggatttggcgtactgattcctcgtggccagggcatccgtacccttggcaccatttggtcgtcctgtctttttccccaacgcacccccgccggctggcaagtctttacaagttttattggcggtgccacggatcctgatttggctagccttagggaagaagccattgtccagcaagtgcagcaggatttgacccgcctccttgatttacccgccgccaaggcacgattactcggtatgaaagtttggcgacgggcgattccccaatatcttgtgggctaccctcagcagtggcagcaggtgacccatgccctcagccacacccctgggcttttcctgtgtagtaactatgcggagggggtggccttgggcgatcgcgtcgaacatggcaatcgaaccgctgctgctgttgctgcctacctttcaggaggttaa

SEQ ID NO: 963 - DNA, 1404 bp, synthetic construct
  source 1..1404: mol_type = other DNA
  misc_feature 1..1404: note = Gene encoding SEQ ID NO: 884
atgattgaggtagatgtcgcaattgttgggggtggtctcagtggcctcagtgttgcttggcggttgcagcggagcgcccctcactacagtggcgttcttttagaggccagcgatcgcctggggggcaatatcacgacccaagcggcggagggctttgtctgggaactgggtcccaatagctttgcccccacccctgccctcctacaactcattgccgaggtgggcttgcactcagagctcattcggggcgatcgccacctaccgcgctacatctactggcggggggaactctaccccctcgaacccacccgtcccctggccttggccacttcaaatttgctcagcccttggggaaaagtacgggcagcccttggtgccttggggtttgtgcctccctatctgggcagtggggacgagtcagttgattcatttttccggcgccatttggggcaagaggttgctgaacgactagtggccccctttgtctctggggtttatgccggtgatccgcaacaattgagtgccgctgccgcttttcgtcgtattgcccaactggaaaaactagggggtagcctcattgccggggctctgcgcctgcggcgtcaacaaccccctcaaccaaaaccccctgcacaggtgcaaatgcgaccaggggagcttggctcctttagggaaggtttggctgctctgccgcgggcgatcgcccaacaattgaaggcaccccttcacctgcaaacccctgttgaagcaatcaccccagaacccaagggtggctacctgctgcgcagtggtgagcaaacgtggcatgcccgcagtgtggtcttggcaacgcctgcctatcaaagcgcagagttagtcgctcccttccagccagcgatcgcccgtgctttggcgaccatcccctatcccaccgtggcctgtgtggtgttggcctaccctgccggactgggacgcagtgtacgccccggatttggagtactggttcctcgtggtcagggcatccgtaccctgggcaccatttggtcgtcctgtctttttccccaacgcacccccgccggttggcaagtcttcaccagttttattggcggtgctacggatcccgatttggctagccttagggaagaagcgattgtcgagcaagtgcagcaggatttgacccgcctccttgatttacccgcagccaaggcacgattactcggtatgaaagtttggcgacgggcgattccccaatatattgtgggctaccctcagcagtggcagcagctgacccatgccctcacccaaacccctgggcttttcctgtgtagtaactatgctgagggtgtggccttgggcgatcgcgtcgaacacggcaatcgaaccgctgctgccgtggctgcctatcttgcaggaggccagtcctag

SEQ ID NO: 964 - DNA, 1431 bp, synthetic construct
  source 1..1431: mol_type = other DNA
  misc_feature 1..1431: note = Gene encoding SEQ ID NO: 885
atgagtgaacctattgtcgtagatgttgctgttgttggggcggggttaagcggcctgagtgttgcatggcggttgcaacaggtggcaccgcagtacaaggtggtggtgctggaggccagcgatcgcctaggcgggaacatcacgaccgaagcgcgggacggctttgtgtgggaattgggccccaatagttttgcgcccacccctgccctgctgcaccttattgccgaggtggggcttcaggatcaactgctgcggggcgatcgccgcctgccccgttacatttattggcgcggcaagctccaccctttagagcctacccgccccctcgccctcgccacgagcgggttacttagcccttggggaaaactgcgagccgccttaggtgcctttggctttgtcccgccctaccttagggatgccgatgaatccgttagctcgttttttcagcgccacttagggaaagaggtagccgagcgattggttgcgccctttgtgtctggggtttatgctggcgatccacaacaactgagtgcagcggcggcctttcggcgcattgtccaactggagcagctcggcggtgctctcataccgggtgccctacggctacggcggcagcagccccccaagcccacccccccaaagggactcgagatgcgtccaggggaactggggtcgtttcaggagggattaagtgccctcccgcgggcgatcgcccaccacttagcagcacccattcacttacaaacggcactgcatcagcttacccccgaactcagcggcggctataccctaagcgccaccacccctgatggcgagcaagcatggcgtgcccgtagtgtggtgctggccacccccgcctatgtcaccgcagacctcctgcggccatggcaacccacaattgctgccggtctagaggccattccctacccagcggtggcctgcgtggtcttggcctatcctgccgcggtgggggtaaccgctcgtcccggctttggggtactgattccccgcactcaaggattacgcacccttggcacaatttggtcatcttgcttgtttcccgagcgcacgccgtctggctggcaagtgtttaccagctttattggtggggcaacggatcctgaattggcgacgcttgaacccgaggccattgtccagcaggtgcagcaggatttagagcacatgcttgccttacccccagccaaagcccgcttattggggatgaaactgtggcggcgagccattccccaatacacccttggctatccgcagcagtggcagcagatcacccacgccctgaagcacctgcccggcctattcctgtgtagtaattacgcggctggcgttgccctaggcgatcgcgtcgaacatgggtataacactgctgctgcggtggatgcctacttaggagggacgtatggctctgtctaa

SEQ ID NO: 965 - DNA, 1455 bp, synthetic construct
  source 1..1455: mol_type = other DNA
  misc_feature 1..1455: note = Gene encoding SEQ ID NO: 886
atgacgaacgtagtagatactttgattgtgggtgcaggtattagcggtttgagtctggcccacgcacttcagaagcaagctaagactgcgcctcccctgaagattttagtcgctgagagtcagggacgggtgggcgggaatatcacaactcagacagatggagggtttctctgggaggagggcccgaatagttttgcgccgacaccggaattgatgaagttggctgtggatgtggggctgaagcaggagttgatttttgccgatcgcaaattgcctcgttatgtttattggcaagggaagctgcaaccggtgccgatgactccgcaggcgatgattcagtcccagttactgagttttccggggaaactgcgggcgcttgtcggggctttgggctttgtggggccggcgatgggttctcaattgtcgcagcagggtggagaggaaactgtttctcaatttttccgacgccatcttggtacggaagtgatgcagcgattggtggaaccttttgtttctggggtttatgcgggcgatccgcaacagttgagtgcggcggctgcttttggccgggtaactcagatggctgatgtgggtggcggcctagtggcgggcgcgctgctttctgctagaaaaaggccgaagaaattgcccgtagacccgaatattcctcagactaagccgggggagttgggttcgtttaaacaggggttgaaggctctgccagaggcgatcgctgctcaattgggcgatcggctcaaactcaattggcacttgactcgcctccaacgcacggaacgccaaacttacattgcggaatttgctacacctgacggccagcaacaagttgaggcgcgcaccgtcgttttgacaactcccgcctacatcacagcggagttgttggcacctctccaaccggaagttagcagcgctttacaagctgttacttatcctacggttgcctgcgttgtcttagcatatccgctgtcggatgtcaagggtaaattagtgggttttggaaatttaattccgaggggccagggaattcgcaccctggggacgatttggacatcgagcttatttcccgatcgcgcccctgctggttggcaaactctcagcaattacatcggtggggcaacagactcggatatcgccaatcttgaccccgaacaaatcgttggggaggtacatcgagatttatctcggattttgctgaagcctctggcggcgcagcccaaagttttggctgtgaacctgtggaagcgggcgattcctcagtacaatttggggcatctcccgcgcctgcaacaggtcgagaacggcttaaaatccttgccgggggtgtatttgtgcagcaactacgttggcggggtggctttgggagattgcgtgcggtggggttttgagcgggcgatcgaagtcagcgagtatttgcaagaaacagggcatagggcatag

SEQ ID NO: 966 - DNA, 1431 bp, synthetic construct
  source 1..1431: mol_type = other DNA
  misc_feature 1..1431: note = Gene encoding SEQ ID NO: 887
atgacgaacatagtagatactttgattgtgggtgcaggtattagcggtttgagtctggcccacgcactccagaaacaagctaagactgcgcctcccctgaagattttagtcgctgagagtcggggacgagtgggcgggaatatcacaactcanngggaggagggcccgaatagttttatgccaacaccggaattgatgaagttggctgtggatgtggggctgaagcaggagttgatttttgccgatcgaaaattgcctcgttatatttattggcaagggaaactgcaaccagtgccgatgactccccaggcgatgattcagtcccagttgctgagttttccggggaaactgcgggcgctgttcggggctttggggtttgtggggtcggcgatgggttctcaattgtcgcagcagggtggagaggaaactgtttctcaatttttccgacgccatcttggtacggaagtgatgcagcgattggtggaaccttttgtttctggggtttatgcgggtgatccgcaacagttgagtgcggcggctgcttttggccgggtaactcagatggctgatgtgggtggcggcctagtggcgggcgcgctgctttctgctagaaaaaggccgaagaaattgcccgtagacccgaatattcctcagactaagccgggggagttgggttcgtttaaacaggggttgaaggctctgccagaggcgatcgctgctcaattaggcgatcggctcaaactcaattggcacttaactcgcctccaacgcacggaacgccaaacttacattgcggaatttgctacacctgacggccagcaacaagttgaggcgcgcaccgtcgttttgacaactcccgcctacatcacagcggagttgttggcacctctccaaccggaagttagcagcgctttacaagctgttacttatcctacggttgcctgcgttgtattagcatatccgctgtcggatgtcaagggtaaattagtgggttttggaaatttaattccgaggggccagggaattcgcaccctggggacgatttggacttcgagcttatttcccgatcgcgcccctgctggttggcaaactctcagcaattacatcggtggggcaacagactcggatatcgccaatcttgaccccgaacaaatcgttggggaggtacatcgagatttatctcggatgttgctgaagcctctggtggcgcagcccaaagttttggctgtgaacctgtggaagcgggcgattcctcagtacaatttgggtcatattcagcgcctgcaacaggtcgagaacggcttaaaatccttgccgggggtgtatttgtgcagcaactacgttggcggtattgctttgggtgattgcgtgcggtggggttttgagcgggcgatcgaagtcagcgagtatttgcaagaaacagggcgctag

SEQ ID NO: 967 - DNA, 1476 bp, synthetic construct
  source 1..1476: mol_type = other DNA
  misc_feature 1..1476: note = Gene encoding SEQ ID NO: 888
atggaagttttagataccttgattgtgggtgcggggattagcggtttgagtttggcacacgcacttcaaaaggaagccaggatcgcatcgccacgggcgattttggtcgctgagagtcagggacgtgtgggcgggaatattacgactgcgacaggggaggggtttctctgggaggagggcccgaatagtttttcgccgacgccggagttgctgaagttggctgtggatgtgggtttgaagcaggagttgatttttgccgatcgcaagttgccgcgttatgtttattgggataagaagctgcaaccggtgccgatgactcctggggcgatgattcagtctgggttgctgagttttccggggaaactgcgggcgctgttcggggctttggggtttgtggcgcctgcaatgggttctcaactttcgcagcagggtgatgaggaaactgtttctcaatttttccgccgtcatctggggaaggaagtgatgcagcgcttggtggaaccttttgtgtctggggtgtatgcgggggatccccaacaacttagcgcggcggcggcttttggccgggtaacaaagatggctgatgcggggggctctctggtggcgggggcgctgctttctgctaggaaaaaaaaaccccaacccccccttggtaaaggggggctaaatgctcttgcagacccgaatattccgaagactaagcggggggagttgggttcgtttaaaggggggttgaaggctctgccagaggcgatcgctgcttctttgggcgatcgagtgaaactcaactggcatttgactaggctcgatcgcactgaacgggaaacttacattgctgtattttcaacacccgacggacagcaggaaattgaggcgcgcacggtggttttgacgaccccggcttacgtgacagcggagttgttgcagcctctgcaaccgtccgttagcagcgctttacaagcttttacttatcctacggttgcatcggttgtattagcatatccgatgtcggatgtcaagggcaaattagtgggatttggaaatttaattccgagagggcagggaattcgcactctggggacgatttggacatcgagtttatttcccgatcgcgcgcctgcgggctggcaaactctcaccagttatattggcggagcaactgattcgggaattggcaatcttgacgccgaacaaattgttggggaggtgcaccgagatttgtctaggattttgctgaagccggaggcggcgcagccgaaagttttgactgtgaaactttggaagcgggcgattcctcagtacaatttgggttatttcgatcgcctgcaacagatcgatcggggtttaaaatctttgcccgggctgtatttgtgcagcaactacttaggcggggtggctttgggagattgcgtgcgcaggggctttgagcgagcgcaagaagtgggcgagtatttgaacgatagttttgagttttga

SEQ ID NO: 968 - DNA, 1404 bp, synthetic construct
  source 1..1404: mol_type = other DNA
  misc_feature 1..1404: note = Gene encoding SEQ ID NO: 889
atggacgatcgccaaggggagccaaccgaggttttggtggtgggggccggcatttgcggcttgacggtggcccatggcttggcgcagcggggtgtggcctgtcgggtggtggaagccagtgaccgcgtggggggcgcgatcgtcacccggcgggagcatggctttcagtgggaggagggccccaacagcttttcgcccaccccggagttgttggctttggcgatcgccatgggtttgcgggacgagttgattttggctgaccggcggttgccccggtatgtgtggtggcaaaaccgtttgcaggcggtacccatggccccaccgggtctcctgacgacgggtttgttgtcgccgtggggcaaattgcgggcggcggtgggggccttggggtttgtgccccccagctttgcggcggatgagacggtggggagttttttccggcggcatttggggccggaggttttgacgcggttggcggcaccgtttgtatcgggggtgtatgccggcgatcccgaagccctctccattggcgcggcttttccccgggtgacggcgatcgaagcgatggggggcggcctggtggcggggtttatccaggccctgcggcagcggggggcccccgatccccatttgccccagaccaagccgggggagttgggttccttccgggaagggatcgaggctttgccccgggcgatcgccgccgatttagcccaacggggggtgaccctaaccttgaaccaagccttaacccgattggaacccacgggcgatcgctggcgggcggtgttggccagcggcgaggaattggaagcccggagtgtggtgttggcggtgccggcgtgggcggcggcgaaaattctccagcaaaccccagaaaccgccgattgggtggcggatttggagagaattccctatccggcggtggcctgtgcggtgttggcctatcccgacggggatttgcggcagccgttgcggggatttgggcacttggtgccgcgggggcaaggcattcgcaccctgggcaccatttgggcatccagtttgtttccggggcgggcccccgccggatacaccctcctgctgaatttcattggcggcaccaccgatcccacactggcgcagttggacgcaggggcgatcgcccaagcggtccaccaggacttgcgacaaattttggttcaaccgacggcggcgccccccaaagtattggcggtgaacctgtggcggcgggcgatcccgcagtttacggtggggcaccaagggcgcttggcgcggctggcggcgggtttaccaccggggttggttttggccgggaattatcgggggggggtggccctcggcgattgcgtgcggcacgggctggcggtggcggcccaagttgcggcttttcttgagagataa

SEQ ID NO: 969 - DNA, 1410 bp, synthetic construct
  source 1..1410: mol_type = other DNA
  misc_feature 1..1410: note = Gene encoding SEQ ID NO: 890
atgctggatacgctcgtagttggggcaggtttgagcggattgagcgtcgcgcgatcgctccaaatggcagggcgcaatgtgctggttgccgaggcgcaggagcgtgttggcggtaacattctcacgcagcagagcgatgatgggtttcagtgggaggaggggccaaatagcttctcgccaaaccgcgaactgctcgaactcgcagtcggtgtggggctcagggacaagctgatttttgcagatcgccgtttgccgcgttttgtttactggcgcaatagtttgcatccggtcccaatgagcccgccgcgagcagtgacgacatcgctattgagtcccttaggtaaattacgcgcggtagccggcgcgatcggatttgtgcccccagcgctctccgacgaggagtccgttgccgagttcttcacgcgccatttggggtccgaagttgccgaacgactggttgcgcctttcgtttcgggggtttacgcaggtgatgtcgagcgattgagtgtcagctcagccttccggcaagtcgctaagctgtccgaggtcggtggcgggttgcttgctggagcactcctgacgcgccgtggtaaatccggccctcctcaaaagctccctccaagggttgaccccaatttgccgcgcgtccaacgcggtgagttggggtctttcgtcggcgggttaaaaatgctgcccgaggcgatcgccgctaaactcggcaccaagcttaagctgcactggaccctagaacacttagttcgctgcgagggcggctatcgcgccgaattcgcaactccggaggggcaacagcagatcgaggtgcgttcgctggtattggcaacacctgcttacagatgcgcgcgggtattgcaatcgctcgctccttcggcttgccaagcgctatccgaaatgccttatccagcagtagcgtgcgtagtgctggcgtatccgagctcggcgttttcctctcctttacaagggtttggcaatttgattccccgcggacaaggtattcgcacgctgggtacaatttggtcgtcggcacttttccctgggcgaacgccgccaggctgggagatcttaacgagttttattggcggcgcgaccgaccccgaactcggtacgctgtccgcacagcaaatcgtggcagaggtccgtcgcgacctgcagcgggtgttggtcgataaagaacccaacaccgaaccgcgcgtcctggcagctaaggtttggccgcgcgcgatccctcagtacgtgctcggtcatagcgatcgcctcaaccgcatccaaatcgacctcgaccggctgcccggcttatatttgtgcagcaacttcaccgatggcgtagcgctcggcgactgcgtgcggcggggcttcgagactgctgaggcgatcggacagtacctcaactga

SEQ ID NO: 970 - DNA, 1416 bp, synthetic construct
  source 1..1416: mol_type = other DNA
  misc_feature 1..1416: note = Gene encoding SEQ ID NO: 891
atgctaaagttggcggtagatgttggccttaaacaggatttaatttttgcagatcgtaagctacctcgctatgtttattggaatggtcaattacntttagttgctgagagccaaaatcgagtagggggtaatattacaactgtttctcaaggagattttatttgggaagaaggtcctaatagtttttctcctacacctgaactgctaaagttggcggtagatgttggccttaaacaggatttaatttttgcagatcgtaagctacctcgctatgtttattggaatggtcaattactaccagtgccaatgggtccaacggcgatgttacagtctaagctactgagtgattctggaaagttacgcgctttagttggtgctttgggttttgtgccacctgctgtgggtactggtctgtctcagcaagggggagaagaaactgtatctcaatttttccaaagacatctgggtgtggaggtgatgcagcgattggtagaaccttttgtttctggcgtttatgctggagaccctagtcaacttagtgctactgctgctttttctagagtagcgagaatggccgatattggtggtggacttttggctggtgctgttttgtctgctaaaagaaatcctaagtcaaaggttgctgccgatcctaatattcccaagactaaacctggagagctaggttctttccggggtggtttggaggcattgccaaaggcgatcgctacttatttaggagaagcggtaaaactaaattggcatctcattggtattcgtcgtacagaacaacaaacttatatagcagaattttctactcccaacggttctgagcaaatagaaactcgtactattgctctatctactcctgcttatttttgttctgaattatttaaacctttattgcctgaaattgcttctactttcgatgaattttattatcctactgttgcttgtgtagttttggcatatcctgtttcttctattaaggcaaagatagatggctttggtaatttaattcctagaggtcaaggtatcaggactcttggtactatttggtcttctgctttgtttcctggtagaacacctccaggatggcaagtttttactaattttattgggggtgcaacagacccaggaatttctcagttagatagtgaggcgatcgtttcacgagtacatcaagaccttgggcaaactttattaaagcaagatgcggaacaaccaaaagttctggctgtacatttatggtctcgtgctattcctcagtataatttaggtcataattctaggctggatcagattaatcatggtttaaaatcttggcctggtgtgtatctttgtagtaattatattggtggtgtagctttgggagattgtgttcngtacatcaagaccttgggcaaactttattaa

SEQ ID NO: 971 - DNA, 1464 bp, synthetic construct
  source 1..1464: mol_type = other DNA
  misc_feature 1..1464: note = Gene encoding SEQ ID NO: 892
atggaagttttagataccttgattgtgggtgcggggattagcggtttgagtttggcgcacgcacttcaaaaagaagcaacgagtgcatcgccacgggcgattttggtggctgagagtcagggacgtgtgggcgggaatatcacgactgcgacaggggaggggtttctctgggaggagggcccgaatagtttttcgccgacgccggagttgctgaagttggctgtggatgtcggtttgaagcaggagttgatttttgccgatcgcaaattgcctcgttatgtttattgggaaaagaagctgcaaccggtgccgatgactcctggggcgatgattcagtctcagttgctgagttttccggggaaactgcgggcgctgttcggggctttggggtttgtggggccggcaatgggttctcaactttcgcagcagggtgatgaggaaactgtttctcaatttttccgccgtcatctgggaaaggaagtgatgcagcgcttggtggaaccttttgtgtctggggtttatgcgggggatccccaacaacttagcgcggcggctgcttttggccgggtaacaaagatggctgatgcgggtggcgggctggtggcgggggcgctgctttctgctaggaaaagacccccccaacccccccttaccaagggggggctaaagactgttgcagacccgaatattccgaagactaagccgggggagttgggttcgtttaaaggggggttgcaggctctgccagaggcgatcgctgcgaacttgggcgatcgactgaaactcaactggcacctgactcgactcgatcgcacggaacgcgacacttacatagctgtattttctacgcccgacggacagcaggaagttgaggcccgaaccgtagttttgacaacaccggcctatgttacagccgagttgttggagcctctgcaaccgtccgttagcagcgctttacaagcttttacttatcctacggttgcctccgttgtattggcatatccgatgtcggatctcaagggtaaattagtgggatttggaaatttaattccgagggggcagggaattcgcactctggggacgatttggacatcgagtttatttgccgatcgcgcgcctgcgggctggcaaactctcaccagttatatcggcggggctactgattcgggaattggcaatcttgacgccgaacaaattgttggggaggtgcaccgagatttgtctcagattttgctgaagccggaggcggcgcagccgaaagtgttgactgtgaaaatttggaagcgggcgattcctcagtacaatttgggtcatttcgatcgcctgcaacagatcgatcggggcttaaaatctttgccggggctgtatttgtgcaccaactactttggcggtgtggctttgggagattgcgtgcggagaggttttgagcgggctcaagaagtggacgagtatttgaacggatag

SEQ ID NO: 972 - DNA, 1428 bp, synthetic construct
  source 1..1428: mol_type = other DNA
  misc_feature 1..1428: note = Gene encoding SEQ ID NO: 893
atggtagatactctaatcattggtgccggaataagcggtcttagcctagcctacgccttacatcaagacgggcgaaaagttttgctgtgcgaacgtcaagaacgagttggcggaaatattacaacaggtaaggcgggtgggtttctttgggaagaagggccaaccagctttacaccaacaccagcactgctaaagctggcagtagatgtggggttgagagaggagttggtgttagcagaccaccgcttacctcgttttgtctactggaaaggtcagctacttcctgtaccgatgagtccaccatcggctgtcacatccaagttactaagcttgtcaggcaagtttagggctttagtaggtgctttagggtttatcccaccagcaataggcaaccacttatctcagcaaggaggcgaggaaacagttgctcagttttttaagcgccatttagggacagaagtggcagaaagattggtagcgccgtttgtctctggtgtctatgctggtgatgtgcatcaactcagcgcccgttcagcttttcggcggatcgctcaactagaaaatgtgggcgggggactggtatctggggcaatattgtcacggaagcaacgccagcaacagaaaccgccaacagatcccagtttgcctactgttcgccgtggtgaattaggctcgtttaaagagggtttacaatctctaccaaaagcgatcgcatcccatctgggtgaaaatattaaactaaattggactttgactgagcttcgtcaaacagccaatcaaacttatattgcagaattttctaccccagaaggtagtcagcaggtagaagcgcgtactgttgttctaactaccccagcttatgtaaccgccgaattgctgcataatctagcaccaaatgcgagtattgccttaaaagaaattccttatccctcagtagcttgcgttgtcttagcttatccagacgatgccttaaaatttcccctaaaaggctttggaaacttaattccacgaggtcaaggtattcggactctaggcacaatttggtcttctagcttatttccaggacgtgcgccgcaaggttggcaaatgctaactaattttattggtggggctacagatccagaagtaggtaatctagacaacgagcaattagttcaagcagtccataaagacttgcagcgcgttcttcttaaaaaagatgtacctccaaaagcgatcgcagtacatttatggaaacgggcaattcctcaatatactttaggtcatcatctgcgtttagcccaaatcaatcaagatttggcacaactacctggtttatatctatgtagtaactacactgatggcgtttctttaggtgattgtgtgcaacgcgcctacgatcaattaccaattatcaataaacaactatcaattatcaatgacaattag

SEQ ID NO: 973 - DNA, 1464 bp, synthetic construct
  source 1..1464: mol_type = other DNA
  misc_feature 1..1464: note = Gene encoding SEQ ID NO: 894
atggaagttttagataccttgattgtgggtgcggggattagcggtttgagtttggcgcacgcacttcaaaaagaagcaacgagtgcatcgccacgggcgattttggtggctgagagtcagggacgtgtgggcgggaatatcacgactgcgacaggggaggggtttctctgggaggagggcccgaatagtttttcgccgacgccggagttgctgaagttggctgtggatgtcggtttgaagcaggagttgatttttgccgatcgcaaattgcctcgttttgtttattgggaaaagaagctgcaaccggtgccgatgactcctggggcgatgattcagtctcagttgctgagttttccggggaaactgcgggcgctgttcggggctttggggtttgtggggccggcaatgggttctcaactttcgcagcagggtgatgaggaaactgtttctcaatttttccgccgtcatctgggaaaggaagtgatgcagcgcttggtggaaccttttgtgtctggggtttatgcgggggatccccaacaacttagcgcggcggctgcttttggccgggtaacaaagatggctgatgcgggtggcgggctggtggcgggggcgctgctttctgctaggaaaagacccccccaacccccccttaccaagggggggctaaagactgttgcagacccgaatattccgaagactaagccgggggagttgggttcgtttaaaggggggttgcaggctctgccagaggcgatcgctgcgaacttgggcgatcgactgaaactcaactggcacctgactcgactcgatcgcacggaacgcgacacttacatagctgtattttctacgcccgacggacagcaggaagttgaggcccgaaccgtagttttgacaacaccggcctatgttacagccgagttgttggagcctctgcaaccgtccgttagcagcgctttacaagcttttacttatcctacggttgcctccgttgtattggcatatccgatgtcggatctcaagggtaaattagtgggatttggaaatttaattccgagggggcagggaattcgcactctggggacgatttggacatcgagtttatttgccgatcgcgcgcctgcgggctggcaaactctcaccagttatatcggcggggctactgattcgggaattggcaatcttgacgccgaacaaattgttggggaggtgcaccgagatttgtctcagattttgctgaagccggaggcggcgcagccgaaagtgttgactgtgaaaatttggaagcgggcgattcctcagtacaatttgggtcatttcgatcgcctgcaacagatcgatcggggcttaaaatctttgccggggctgtatttgtgcaccaactactttggcggtgtggctttgggagattgcgtgcggagaggttttgagcgggctcaagaagtggacgagtatttgaacggatag

SEQ ID NO: 974 - DNA, 1464 bp, synthetic construct
  source 1..1464: mol_type = other DNA
  misc_feature 1..1464: note = Gene encoding SEQ ID NO: 895
atggaagttttagataccttgattgtgggtgcggggattagcggtttgagtttggcgcacgcacttcaaaaggaagcgaggagtgcatcgcctcgggcgattttggtggctgagagtcagggacgtgtgggcggaaatatcacgactgcgacaggggaggggtttctctgggaggagggcccgaatagtttttcgccgacgccggagttgctgaagttggctgtggatgtcggtttgaagcaggagttgatttttgccgatcgcaaattgcctcgttttgtttattgggaaaagaagctgcaaccggtgccgatgactcctggggcgatgattcagtctcagttgctgagttttccggggaaactgcgggcgctgttcggggctttggggtttgtggggccggcaatgggttctcaactttcgcagcagggtgatgaggaaactgtttctcaatttttccgccgtcatctgggaaaggaagtgatgcagcgcttggtggaaccttttgtgtctggggtttatgcgggggatccccaacaacttagcgcggcggctgcttttggccgggtaacaaagatggctgatgcgggtggcgggctggtggcgggggcgctgctttctgctaggaaaagacccccccaacccccccttaccaagggggggctaaagactgttgcagacccgaatattccgaagactaagccgggggagttgggctcgtttaaaggggggttgaaggctctgccagaggcgatcgctgcgaacttgggcgatcgactgaaactcaactggcacctgactcgactcgatcgcacggaacgcgacacttacatagctgtattttctacgcccgacggacagcaggaagttgaggcccgaaccgtagttttgacaacaccggcctatgttacagcggagttgttggagcctctgcaaccttccgttagcagcgctttacaagcttttacttatcctacggttgcctccgttgtattggcatatccgatgtcggatctcaagggtaaattagtgggatttggaaatttaattccgagggggcagggaattcgcactctggggacgatttggacatcgagtttatttgccgatcgcgcccctgcgggctggcaaactctcaccagttatatcggcggggctactgattcgggaattggcaatcttgacgccgaacaaattgttggggaggtgcaccgagatttgtctcagattttgctgaagccggaggcggcgcagccgaaagtgttgactgtgaaaatttggaagcgggcgattcctcagtacaatttgggtcatttcgatcgcctggaacagatcaatcggggcttaaaatctttgccggggctgtatttgtgcaccaactactttggcggtgtggctttgggagattgcgtgcggagaggttttgagcgggctcaagaagtggacgagtatttgaacggatag

SEQ ID NO: 975 - DNA, 1437 bp, synthetic construct
  source 1..1437: mol_type = other DNA
  misc_feature 1..1437: note = Gene encoding SEQ ID NO: 896
atgctggatgcgttagtcgtgggcgctggcatcagcggtttgagcttggggcgcaccctgcagcagcagcagcactcgctgctcgtggccgagcgccaaccccaggttgggggcaacattaccaccagcagcactggcgagtttttgtgggaggaagggcccaacagcttctcgccggcgcgagagctgcttgagcttgccgtcgatgctggcctgcgcgaggagctcgtgctggccgaccgacagctgccgcgctacatctactggcgggggcgactgcagccggtgcccatgcgcccttcggccgcgctcaaaacgcagctgctgagccctagcggcaagctgcgagcgctggccggggcgctgggatttgtccccccggcggtgggcgaggcggtatcgcagcaaggcggcgaggaaacggtcgcgcagtttttccaacgccatctggggcgcgaggttaccgagcgtttggtcgccccgttcgtctcgggcgtttacgccggcgacgtccgccagttgagcgcccaggccgccttccggcgcgtcacgcagctcgccgatcgcggcggcggcctgctccccggagcgcttctggggcggcaggcggccccgcaacgcccggctaccagccagacgcagctcccccaaacccaaagtggggagctgggctcgttccgcacgggcttgcaggcgcttcccaacgccattgccgagcgcttgggggatgccctgcgctgcaactgggcgctatcgcagctgcagcgcaccgagcgcgacagctatttggccaccttccaaacgccccaggggccgcagcaggttgaggcgcgtgcggtggtgctcaccaccccagcctataccagcgccgagctattgcgcccgctgcacgcccgcgccagccagcggctggctgccattccctacccgccggtggctagcgtggtgctggcctacccgcagcaggcgttgggcggggccctgcgcggctttggcaacctcaacccgcgcggtcaaggcattcgcaccctgggcacgatttggtcgtcggcgctgtttgccggccgcgcgccggctggttgggaaatcctgactagctttattgggggcgccactgaccctgaaatcgctcgcctggatgaagatcgcatcgtgcaagccgtccacgccgatttgcgccaggtcctgctggcgcgctacgtggcacccaaggtgctggccgtgcggctctggcaccgcgccattccgcagtacgccatcggccaccaggcccaaatgcaagccctcgaagccgagctagccgagctgccggggctgtttctgtgcagcaactacctcgatggggtctcgctgggcgattgcatccgccgcggcttcgagcgggcgcacacggtttcgcactacttgcaagcgcctgcggcagctccagcggcctga

SEQ ID NO: 976 - DNA, 1440 bp, synthetic construct
  source 1..1440: mol_type = other DNA
  misc_feature 1..1440: note = Gene encoding SEQ ID NO: 897
atgactcacgtactcgatagtttgatcgtcggtgctggcattagcggcctgagtttagctcattctctccttcggaacccaaaccctcaattgtctctcaacattctggtgagcgagcatcaaggacgggtaggaggaaacataaccacagtatctcaaggagagtttctctgggaagaaggccccaatagtttctctccgacccctgagttactgaagttagccgtagaagttggcctcaagtctgagttcgtctttgccgatcgcaagttacctcggtatgtttactggaatagtcaacttatgccagtgccgatgagtcctccggctttgttgagtacaaaactcttaagtcctggaggtaaactccgagcattaacgggggcattaggatttgtacggccggcgatgggacaagcgttaagtcaacaaaatggggaagaaacgatctcgcagttttttgagcgtcatttgggttcagaagttctcaaacgactggttgaaccctttgtttccggggtctatgcaggcgatccacagcaactcgaaattagctcggcttttgcccgagtcgcacgtatggcttacagtggcggtgggttagttgccggagcggttttatcacgtggtcagaacaaatcttcgcgatcgcctgccgatccgtctattccccaaactaaacggggagagttggggtcttttcgtcagggaattggagccttacccaatgcgatcgcgcagcagttaggcgatcaactcaaattaaactggcaactcactcgtcttgaacggactgaaaaccaaacttatcgggctgaattttcgaccccagatggcgttcaacaggtcgaaactcgaacggtagtgttgacaactccggcttatgtcacagcagaaattctgaaaccgttgcaactccaagtcagtcaaacgttaaccgaaattccttatcctccggtggcttgcgtcgttttagcctatcccgtttcagctttcaagcagaaattaaccggatttgggaatttagttccccgaggacaaggaattcggacgttaggcacgatttggacctcaagtttatttcccggtcgcgccccccaaggctggcaagttctcaccagttatattggcggagcgactgatccagaaattggagagttagaagatgatcaaattgttgaggcggttcatcaagatttgcgtcgcattttactcaaagaagatatctctcccaaagtgctagccgtgcatctgtggaaacgtgctatccctcaatacaatctcggacaccaacaacggttacaacaggttaatgaaggtctagaggcaatgccagggttatatctgtgtagcaactatatcgacggtgtagcgttaggagattgtgtgcgtcgttctataggacaagctaacgaaattctcagttttttggatcaatag

SEQ ID NO: 977 - DNA, 1446 bp, synthetic construct
  source 1..1446: mol_type = other DNA
  misc_feature 1..1446: note = Gene encoding SEQ ID NO: 898
atgacgaatgtagtagatagcttgattgtgggtgctggtattactggcttgagtctggcccacgcacttcataaggaagcaaagactggaactccggtgaagattttggttgctgagagtctgggacgtgtgggggggaatatcacaacttgtacagggaatgggtttctgtgggaggagggcccgaatagtttttcgccgacggtggagttgatgaagttggctgtggatgtggggctgaaggaggagttgatttttgccgatcgcaaattacctcgttttgtatattggcaaaataagctgcaaccggtgccgatgactccacaggcgatgattcagtcgcaattgttgagttttccggggaaactgcgggcgctgttcggggctttgggatttgtggcaccggcaatgggtgctacactttcgcagcagggtggtcaggaaactatttctcaatttttccggcgacatctgggtacggaagtgatgcagcgattggtggaaccgtttgtttctggagtttatgccggcgatcccgaacaacttagcgcggcggcggcttttggtcgggtaacgaggatggctgatttgggtggtggactggtggcgggggcgctgcttggggcgaggaaagggccgaagaaaatgcccgcagacccgaatattcccaagactaagccgggggagttgggttcgtttaaaggggggttgaaggctctaccagaggcgatcgctgctcaattaggcgatcgcctgaaactcaattggcatctcacaggtttgcaccgtactgaaaacaaaacttacattgctgaattctcaacgccggatgggccgcaacaggttgagactcgcactgtggtgttgacaactcctgcttatgtgacagccgattggttccaatctctgcaaccggaagtgagcacggccttacaagcttttacttaccctactgttgcctgcgttgtcctagcatatccgaaatcggatgtcaaggaaaagatggtgggctttggaaatttaattccgaggggacagggaattcggactctggggacgatttggagttcgagtttatttgctaatcgtgcgcctgcgggttggcaaactttgacgagttttatcggcggggctactgattcgggtattgcgaatcttgacgctgaacaaattgtggcccaggtgcatcgagatttgtctcggattttgctgaaaccggatgtcccacagccgaaggttttggcggtgaaggtgtggaagcaggcgattcctcagtacaatttggggcatttcgatcgcctggaacagatcgatcgaggtttaaaatctttgccgggggtttatttgtgtagcaattaccttggtggggtggctttgggagattgtgtgcgtctgggtttggaaagggcgatcgaggttagtaagtatttgcaagaaaccagctag

SEQ ID NO: 978 - DNA, 1446 bp, synthetic construct
  source 1..1446: mol_type = other DNA
  misc_feature 1..1446: note = Gene encoding SEQ ID NO: 899
atgacgaacgtagtagatactttgattgtgggtgctggtattactggcttgagtctggcccacgcacttcagaaggaagcaaagactggaactccggtgaagattttggttgctgagagtctgggacgtgtgggggggaatatcacaacttgtacagggaatgggtttctgtgggaggagggcccgaatagtttttcaccgacggcggagttgatgaagttggctgtggatgtggggctgaaggaggagttgatttttgccgatcgcaaattgcctcgttttgtatattggcaaaataagctgcaaccggtgccgatgactccgcaggcgatgattcagtcgcaattgttgagttttccggggaaactgcgggcgctgttcggggctttgggatttgtggcaccggcaatgggtgctacactttcgcagcagggtggtcaggagactgtttctcaatttttcgggcgacatctcggtacggaagtgatgcagcgattggtggaaccgtttgtttctggggtttatgcgggcgatccccaacaacttagcgcggcggcggcttttggtcgggtgacgaggatggctgatttgggtggtggactggtggcgggggcgctgcttggggcgaggaaagcgccgaagaaaatgcccgcagacccgaatgttccgaagactaagccgggggagttgggttcgtttaagggggggttgaaggctctgccagaggcgatcgctgctcaattaggcgatcgcctgaaactcaattggcatctcacaggtttgcaccgtactgaaaacaaaacttatattgctgaattttcgacgccggatgggccgcaacaggttgagactcgcactgtggtgttgacaactcctgcttatgtgacagcggatttgttccaatctctgcaaccggaagttagcagcgccttacaagcttttacttaccctactgttgcctgcgttgtcttagcatatccgaaatcggatgtcaaggaaaagatggtgggatttggaaatttaattccgagggggcagggaattcggactctggggacgatttggacttcgagtttatttgctaatcgcgcgcctgcgggttggcagactttgacgagttatatcggtggggctactgattcggggattgggaatcttgatgctgaacaaattgttggggaggtgcatcgagatttgtctcggattttgctgaaacctaatgtgcctcagccgaaggttttggcggtgaaggtgtggaagcaggcgattcctcagtacaatttggggcatttcgatcgcctggaacggatcgatcgaggtttaaaatctttgccgggggtttatttgtgtagcaactacgttggtggggtggctttgggagattgtgtgcgtctgggttttgaaagggcgatcgaggttagtgagtatttgcaagcaaccagctag

SEQ ID NO: 979 - DNA, 1401 bp, synthetic construct
  source 1..1401: mol_type = other DNA
  misc_feature 1..1401: note = Gene encoding SEQ ID NO: 900
atgttagatactttaattgtaggagcaggaatcagcggtttaagcacggcctatcgcctgcatcaagggcaacgccagattttagtcgcagaacagcgcgatcgcgttggcggcaatattgcaacggaacaccagggggaattcctctgggaagaaggccccaatagtttttccccaacgccggagttattaaaactggcagttgatgcgggcttaaaaaatgactttgttttcgctgatcgcaatcttccccgttacgtttattggcagggaaaactgcgtcctgttcccatgagtcccccagcagcagttaaatcgcaattgcttagcccttggggaaaactgcgggcattagccggtgccctgggctttgtttcccctaatgttgaagggaaggaagagacagttgccgacttttttacccgtcacttgggagaagaagtggcgcaacgcctcgtcgctccctttgtgtctggcgtttacgccggagatgttcaccggctcagtgcccaagccgcctttggccgggttacgcaattggctgatgtgggcggtggactggttgcaggggcagtattatcccgcggtaagagaaagcagtcttcatcgacggtaactgagaatgccgatattcccaaaaccaagtccggggaattgggatcctttcgagaaggcttgcaaatgttgccgcgcgcgatcgcgtcaaaactgggcgaatcagttaaattaaactggcagcttaacaatatttctcctcatcccgaacaaggctacattgccgcattttccaccccggaaggggaacaaagcgtagaagctaaaagtattgtcctcactacaccagctcatgtcactgccccaattattcaaaccttatccccgctaaccagcacagcactccaagatatttcttatccgccagtagcctgtgttattcttgcctatccagatgaggcgctgcgcttctccttaaaaggatttggcaacctggttccccgcaaccaaggcttgcgtacgctaggcacaatttgggcatcaacgctatttcctgggcgtgcccctcaaggttggcacattctgacaaactttatcggtggggcaacagatcccgaaattgctcaacttagtgaagaacaaatcatcgaccaagttcaccaggacttacaaaaggtgttactgaaatcggatacgaaccccaaacccttagcggttcatctgtggtcaaaagccattccgcaatatactttaggacatctcgaccgtttagaaacgataagaaatagtctaaaatcttgtcctggcctctttttatgcagcaattatcttgatggggtttcactgggagattgtgtccgtcgcggcgaagaaaccgctcaagccgtgttagattatttgggttaa

SEQ ID NO: 980 - DNA, 1449 bp, synthetic construct
  source 1..1449: mol_type = other DNA
  misc_feature 1..1449: note = Gene encoding SEQ ID NO: 901
atgactgaaatattagatgtcttagtcgtgggtgcaggtatcagtggcttgagtttagcccataaactgacaaaattaagtaataattcacccttgaaaattttagttgctgagagccaaaaccgagtcgggggtaatatcacgacagtttctcaaggagaatttctttgggaagaaggtcctaatagtttttctcccacccctgagcttttaaagttggctgtagatgttggcctcaaagaggatttgatttttgcagaccgtaagttacctcgttatgtttattggaatggtcaattactaccagtaccaatgagcccaaaggcaatgttacagtctcaactactgagtaatactggaaagttacgcgctttagttggtgctttgggttttgttccacctgttgttggtatggatctatctcaggaagggggagaagaaactgtatcccaatttttccaaagacatcttggtaaagaggtaatggaacgattagttgaaccttttgtttctggtgtttacgctggagaccctagtcaacttagtgctactgctgctttttctaaagtggctcgaatggctgaccttggtggtggacttttggctggtgctgttttgtctgctcaaagaaaccctaagtcaaaggctgctgctaattctaatattcctaaaactaaacctggagagttgggttctttccgacgtggtttggaggtattgccaaaagcgatcgctacttatttaggacaagcagtcaagctcaattggtctctcgtgggtcttcgtccgacagaaaaacagacttatatagcagaattttcgactcccaatggttctcagcaaatagaaactcgtaccattgccctctccagccctgcttatgcctgtgctaaattatttagacctttacttcctgaaattgctggtactcttgatgaattctattatcctactgttgcctgtgtagttttggcatatcctgtttcttctatcaaggccaagatagatggctttggtaatttgattcctagaggtcaaggcattcggactcttggtactatttggtcttctgctttattttctggtagaacacctcttggatggcaaatttttactaattatattggtggtgcaacagacccagaaatttctcacttagatagtgaagccatcgttgcacaagttcatcaagacctttgtcaaactctattaaaccagaatcctgaaaaaccaaaagttctggcagtacatatatggtctcgtgctattcctcagtataatttaggttatagttctaggctggctcagattaatcatggcttaaaatcttggcctggagtatatctatgtagtaattatattggtggtgtggctctgggagattgtgttcgtcgtagtatagaagtagcgactgatatttattcgggtatggggtttggggagctttaa

SEQ ID NO: 981 - DNA, 1497 bp, synthetic construct
  source 1..1497: mol_type = other DNA
  misc_feature 1..1497: note = Gene encoding SEQ ID NO: 902
atgaatgccattgcggaaaatggaaacgaggcaaacgaagcatcgcctgtatgggtagataccttaattgtgggtggtggtataagcggattgagcgtggctcatgctttggtcaactgcgatcgctcggtggacaatattttactggcggaaagccaacctcgggtgggaggcagcgtaaccagtgcttcgagtgagggatttttgtacgaagaaggtcccaatagtttttcgcccacacccgaactgctgcaacttgctgtggatgtcggtttgaaagatgagttgattttggctgaccgccgcttgccgcgctacgtttactggcaaggaagattgattgcactgccgaacagtccgcccagtgccgttacttcccctattttaagtcctgtgggcaaactacgggcgctgttgggggcattgggatttgtaccgccccacgtgaccagcgaaccggaaagcgtttccgattttatccgccgccacctgggacctgaagtcttgcaaaaattggtggaaccgtttacttctggggtatatgctggtaaccccgacgaactggaagcggcttctgcttttgcccggatagcacgtttggaaaaagttgggggcagcttggtagcgggagctattttatcgcggcgtcaggcaccaacgcagaaaaaaaaccgcgatcgcaatttgccaaaaacgcaacgcgggcagttaggttcctttcaacggggcttgcagtctttgccggaagccattgccggaaaattgggttcgcgagtgcgggtgaactggcaggcaaaaagcatcggtaaaacggaaggtggcaattatttggtggaatttgctaccccgcaggggcaccaacaggtagaagcgcgatcgctggttttggcaacaccggcttacgtaacagccaacttgctcaaatcctacccccatgtcaattcccagcagcaacaagccatccaagccttggaaagcattccctacccgcccgtagcttgtgtggttttaggctatcccagcagtgcgtttaaaaaacaacccttacatggatttggcaatttgattcctcggggtcagggcattcgcactttgggcaccatttggggctctagtctgtttccggggagggcaccggaaggttgggaattgctgctgaattttattggcggcaccaccgatccagaaattgcgaacttggatcaagaacaaattgcccaactggtacatcgggatttgtgccagaccctgctgcgggaagacaaacaaccaaaagtactacaggttcacttgtggaaacaggccatccctcagtatactatcggtcacgggagtcggctggcagccattgatgcgggggtgcgatcgctaccggggttgtttttgtgcagcaactacagcgatggagtcgccatgggcgattgtgcccgacgcggctacgaactggcaccacgggtggctgagtatttgcaaccgggatcctataaattcgtttga

SEQ ID NO: 982 - DNA, 1491 bp, synthetic construct
  source 1..1491: mol_type = other DNA
  misc_feature 1..1491: note = Gene encoding SEQ ID NO: 903
atggttgtggcaacaccgggcgcggttgaaagcagtgtggcgcgatcaaacccgatcgacctgttgatcgtgggggcaggcttgacggggttgagcgcggcccagcggtttgtgcgccagtcgccggggcgatcgtgcctggtggtggaggcccaagatcgggtcggcggcaacatcaccacgcgatcgggcaatggctttttgtgggaagaaggccccaacagctttgcccccacgccggagttgctgcaactggcggtggaagtgggtctcaaggatcagttggtgtttgctgatggcaagttgccccgctttgtctattgggacgggcgcttgcaggcaattcccatgagtccaggggcattttggaattcgaccttgttgagcgatcggggcaaggcgcggctgctgttgggggcggccggatttgtgccgccgatcctgggggccacggtgcaggcccggggcggcgaagaaaccgtgcgggaattttttacccgacatctgggccaagaaaccatggagcggatggttgatccgtttatttccggggtctatgccggcgatcccgatgccctgagcgcttcggcggccttccgcaagatggcggctatgcaggcagcgggcgggggactggcggccggggcgattcggacgttgctggccaagcggcgggcggccaaaaccgcgcccccggctgacccgaatttgcccaagccaaaatccggtgaactggggtcgttccgggaaggcttgcaaatgctgccggaagcggtggccaaggaactgggcgatcgcgtgaagctgggctggcgggtggaggcgatcgcccgatcaagcaatggcgactacaccgtggacttggcaacccccgatgggccgcgccaaatcacgactcgggcgatcgtcctggccacccccgctccagccacggcgaacctgttgcaacccctggctccggccgccagcgccgccctgcacgcaattccctatccggcggtagcttgcgtgattttggcctatcccgaaacggcctttgcccaatccctgcgcggctttggcaacttgatcccccgtagcttggggctgcaaaccttgggcacgatttgggcttctagcctgtttgcgggccgtgcgccccagggttgggcccacctgatcaacttcatcggtggcgcgcaaaatcctgggctaatcaacaaaaccgaggcggaaattgcagatatcgtccatggggatgtgcggcgcattctgctgaaggaagacgtagctcccaaggtgctgtcggtgaagctgtggcggcgggcgattcctcagtacacgatcggccatgccgatcgcctggccacactgcatcgggaattggccgcctggccggggctgttcccttgcagcaactacgaaggcggtgtggccctgggtgactgtgtgcgccacggttgggatcaagcggctgaggtcgatcgctacctggcccaactgcccgtttag

SEQ ID NO: 983 - DNA, 1446 bp, synthetic construct
  source 1..1446: mol_type = other DNA
  misc_feature 1..1446: note = Gene encoding SEQ ID NO: 904
atgacgaaccgagtagacaccttgattgtgggtgctggtattaccggcttgagtctggcccacgcgctgcacaaggaagcaaagactggagaacccctgaagattttagttgctgagagtcagggacgtgtgggcgggaatatcacaacttctacagggcatgggtttctgtgggaggagggcccgaatagtttttcgccgacgccggaattgatgaagttggctgtggatgtggggctgaagcaggagttgatgtttgccgatcgccaattgcctcgttttgtatattggcaaaataagctgcaaccggtgccgatgactcctggggcgatgattcagtctgggttgctgagttttccggggaaactgcgggctctgttcggggctttggggtttgtggctccggtaatgggtgctacactttcgcagcagggtgaggaggaaactgtttctcaatttttccggcgacatttgggtacggaagtgatgcagcgattggtggagccctttgtgtctggggtttatgccggcgatcctcaacaacttagcgccgcggcggcttttgggcgggtgacaaagatggctgatgctggtggcgggctggtggccggggcgctgctttctgccaggaaacggcccaaaaaaatgcccccagacccgaatattcctcagactaagccgggggagctgggttcgtttaaaggggggctgatggctctgccagaggcgatcgctgcttctttgggcgatcgcctgaaactgaattggcatctgactggtttgcaccgtactgaaaataaaacctatattgcggaattctcaaccccccatgggccgcaacaaattgagactcggactgtggtgctgacaacgcctgcttatgtggcagcggatttgttgcaatctctgcaaccggaagttagcagcactttacaaggttttacttaccctactgttgcctgtgtggtcttagcatatccgctgtcggatgtcaagggtaaattggtgggatttggaaatttaattccgagggggcagggaattcgcactctgggaacgatttggacttcgagtttatttgccgatcgcgcgccggcgggttggcaaactctgacgagttacatcggtggggctacggattcgggtattggcaatcttgaccccgaagaaattgtggccgaggtgcatcgagatttgtctcgcatcttgctcaaaccgaatgtgccacagccgaaggtgttggcggtgaagctctggaaacaggcgattcctcagtataatttggggcatctcgatcgcctccaacagatcgatcgaggcttaaaatctttgccagggatgtatttgtgtagtaattacgttggcggggtggctttgggagattgtgtgcggctgggtttggaaaaggcgatcgcagttagcaaatatttacaagaaaccagctaa

SEQ ID NO: 984 - DNA, 1446 bp, synthetic construct
  source 1..1446: mol_type = other DNA
  misc_feature 1..1446: note = Gene encoding SEQ ID NO: 905
atgacgaaccgagtagacaccttgattgtgggtgctggtattaccggcttgagtctggcccacgcgctgcacaaggaagcaaagactggagaacccctgaagattttagttgctgagagtcagggacgtgtgggcgggaatatcacaacttctacagggcatgggtttctgtgggaggagggcccgaatagtttttcgccgacgccggaattgatgaagttggctgtggatgtggggctgaagcaggagttgatgtttgccgatcgccaattgcctcgttttgtatattggcaaaataagctgcaaccggtgccgatgactcctggggcgatgattcagtctgggttgctgagttttccggggaaactgcgggctctgttcggggctttggggtttgtggctccggtaatgggtgctacactttcgcagcagggtgaggaggaaactgtttctcaatttttccggcgacatttgggtacggaagtgatgcagcgattggtggagccctttgtgtctggggtttatgccggcgatcctcaacaacttagcgccgcggcggcttttgggcgggtgacaaagatggctgatgctggtggcgggctggtggccggggcgctgctttctgccaggaaacggcccaaaaaaatgcccccagacccgaatattcctcagactaagccgggggagctgggttcgtttaaaggggggctgatggctctgccagaggcgatcgctgcttctttgggcgatcgcctgaaactgaattggcatctgactggtttgcaccgtactgaaaataaaacctatattgcccaattctcaacccccgatgggcctcaacaaattgagactcggactgtggtgctgacaacgcctgcttatgtggcagcggatttgttgcaatctctgcaaccggaagttagcagcactttacaaggttttacttaccctactgttgcctgtgtggtcttagcatatccgctgtcggatgtcaagggtaaattggtgggatttggaaatttaattccgagggggcagggaattcgcactctgggaacgatttggacttcgagtttatttgccgatcgcgcgccggcgggttggcaaactctgacgagttacatcggtggggctacggattcgggtattggcaatcttgaccccgaagaaattgtggccgaggtgcatcgagatttgtctcgcatcttgctcaaaccgaatgtgccacagccgaaggtgttggcggtgaagctctggaaacaggcgattcctcagtataatttggggcatctcgatcgcctccaacagatcgatcgaggcttaaaatctttgccagggatgtatttgtgtagtaattacgttggcggggtggctttgggagattgtgtgcggctgggtttggaaaaggcgatcgcagttagcaaatatttacaagaaaccagctaa

SEQ ID NO: 985 - DNA, 1440 bp, synthetic construct
  source 1..1440: mol_type = other DNA
  misc_feature 1..1440: note = Gene encoding SEQ ID NO: 906
atggatgtgttgattgtcggcgcgggtttaacgggcttgagcgctgcccaccgcttggttaatcacccgggcaaccgagggcgatcgaccctggtggtggaagcgcaaaaccgtgtgggcggcaacatcaccacccgatcggccgatgggttcctgtgggaagaggggcccaacagcttcgcccccacgccagagctgctgaaactcgccgtggaagtggggttgaaggatgagctggtgtttgcggatggcaagctgccccgatttgtctactgggacggtcggttacaagccattcccatgagtcccggcgcattttggaattccaccttgctgagcgatcggggcaaagccagactgctgttaggtgcggcgggttttgtgcccccgatcgtgggtgcagccatttcggcaaggggcggcgaagaaaccgtccgtgaattcttcactcgccacctgggtcaagaagccatggagcgcctcgtggatccctttatctcgggggtttatgccggagatcccaatgccctcagtgcttcggcggccttccgcaaaatggccgccatgcaagcggccggtggtggcttgggagccggggcggcgcggattctctgggccaaacgccaagcggccaaacaagcacccccagccgatccccgcttacccaagcccaagtccggggagttgggatccttccgcgagggactgcaagctttgccggaagcggtggcaagcggtttgggcgatcgggtcaagttgggttggcaggtggaagcgatcgcccgtgatccccaaggcgtttaccaggttgcgatcgccagccccgatggcccccaacagatcacggctcgatcgatcattctggccaccccggctccggtcacggctcaactgttggaacccctcgccccccgagccagcaccgccctcaacgccattccctaccccgccgttgcctgcgtaattttggcctatcccgaaaccgccttttcccagtccctgcgcggctttggcaacctgattccccgcagcctgggcctgcaaactctaggaaccatttgggcttccagcctgtttgcgggacgcgctccccaaggttgggcccacctaatcaacttcattggcggcgcacaaaaccccaccctgatccacaaaaccgaagacgaaatcgcccaaatggttcatgcggacgtgcggcggattttgctgaaacaggacgtgccgcccaaggtgctgtcggtcaaactctggcggcgggcgatcccgcaatacacgatcgggcatgggtctcgcctggccaccttgcaccaggagcttcagcattggcctggcctctttgcttgcagcaactatgaaggcggcgtagcgctgggtgattgcgtgcgccatggttgggaacaggccgacgcgatcgagcagttcctcggcagtcgagtctag

SEQ ID NO: 986 - DNA, 1473 bp, synthetic construct
  source 1..1473: mol_type = other DNA
  misc_feature 1..1473: note = Gene encoding SEQ ID NO: 907
atgaattccaccgatttagccaatccatctactacccttgataccttaatcgtcggtgcagggattacgggtcttagtctcgcccaagcacttcagcaagaccgcaagcgcggtcgccaatcagggcagattttattgacagaaagtcaagaaagggtaggggggcgcattgttacacaatcgcaagacggatttctctgggaagaaggtcccaatagttgcttaccaacccctgagtttctcaagttggcggtggatgtgggattaaaagatgagttggtgctggctgaccgtcgtcttcctcggtatgtttatttacagggagagttaatcccagtgccgatgagtccgccagcattttttcagacgaagttactcagcgattggggtaagttacgcgcgatcgccggggctttgggttttgtgcctcccgctatcggtgccaccctatccgcccaaggggatgaagaaaccgtagcccagttctttggtcgtcacctggggcaggaagtcttggaacgtctggtacagccctttgtgtctggagtctatgcgggagatcccaatcaactcagtgccagcgccgcttttgggaaagtcactaaaatggccgatatcggcggtggactggcggctggggcgattttatctttagcgaaaaatgggagagcgaaaaagacggtggatccgagtctgcccaaagtccagcgcggggaattagcttcatttcgtcaaggtctggaagctttacccaaggcgatcgcggctcaattgggcgatgtagtcaagttaggctggcatttaatccaaattaaacccacagaacaccaaacttatctggccgaattttccaccccccaaggtccagccagaattgaaactcgcagtatggttctgaccacccccagctatgtctccgctgacttgttagccaatctttgcccagtggcgagtcaagggttagccaaaattccttatccagcggtcgcttgcgtggtcttaggctatcctgaaagcgcctttaaaaccagtgtatcatcgggttttggcaacttaatccccagaggtcaaggaatacgcaccttgggtacgatctggtcttcgagtttatttcccaatcgcgctcccgctggatggcgcttattgcttaattttatcggtggcaccacggatctggcgatcgctcagttaagccaagaagaaatcgtccaaatcgtacacagagatctgcaaaaaaccctgctcaaacaggacatcccaccgaaagtcctggcggtgcatttatggaagcgggcaattccccaatatcccctcggccatcatcaaaacctggcacaaattcatcactctttgcaacaacggcctggattatttttatgtggcaactatacggatggggttgccgtaggcgactgtattcgccgtggccaagaatgtgccgctgacgtggtgaaatatttagatcaaggctaa

SEQ ID NO: 987 - DNA, 1440 bp, synthetic construct
  source 1..1440: mol_type = other DNA
  misc_feature 1..1440: note = Gene encoding SEQ ID NO: 908
atggatgtgttgattgtcggcgcgggtttaacgggcttgagcgctgcccaccgcttggttaatcacccgggcaaccgggggcgatcgaccctggtggtggaagcgcaaaaccgtgtgggcggcaacatcaccacccgatcggccgatgggttcctgtgggaagaggggcccaacagcttcgcccccacgccagagctgctgaaactctccgtggaagtgggtttgcaggatgagctggtgtttgcggatggcaagctcccccgatttgtctattgggacggtcggttacaagccattcccatgagtcccggcgcattttggaattccactctgctgagcgatcggggcaaagccagactgctgctaggcgcggcgggttttgtgcccccgatcgtgggtgcagccatttcagcaaggggcggtgaagaaaccgtccgtgaattcttcactcgccacctgggccaagaagccatggagcgcctcgtggatccctttatctcgggggtttatgccggagatcccaacgccctcagcgcttcggcggccttccgcaaaatggccgccatgcaagcggccggtggtggcttgggagccggagctgcgcggattctctgggccaaacgccaagcggccaagcaagcgcccccagccgatccccgcttacccaagcccaagtccggggagttgggatccttccgcgagggactgcaagccttgccggaagcggtagcaagcggtttgggcgatcgggtcaagttgggttggcaggtggaggcgatcgcccgtgatccccaaggcacttaccaggttacgatcgccagccccgatggcccccaacggatcaccgcgcgatcgatcattctggctaccccggctcccgtcacggcccaactgctcgaacccctcgccccccgagccagcaccgccctcaacgccattccctaccccgccgttgcctgcgtgattttggcctatcccgaaaccgcctttgcccagtccctgcgcggctttggcaacctgattccccgcagcctgggcctgcaaaccctaggaaccatttgggcttccagcctgtttgcgggacgcgctccccaaggttgggcccacctgatcaacttcattggcggcgcacaaaaccccaccctgatccacaaaaccgaagacgaaatcgcccagatggttcatgcggacgtgcggcagattttgctgaaacaggacgtaccgcccaaggtgctgtcggtcaagctctggcgacgggcgatcccgcaatacacgatcgggcatgggtctcgcttggccaccttgcaccaggagttgcaacattggcctggcctctttgcttgcagcaactatgaaggcggcgtagcgctgggtgattgcgtgcgccatggttgggaacaggccgacgcgatcgagcagttcctcggcagtcgagtctag

SEQ ID NO: 988 - DNA, 1437 bp, synthetic construct
  source 1..1437: mol_type = other DNA
  misc_feature 1..1437: note = Gene encoding SEQ ID NO: 909
atgactgaagttttagatgtcttagttgttggcgcaggtattagtgggttaagtttagcccatgcactgacaaaattaggtaataattccccgttaaagattttagttgcagaaagccaaaatcgagtggggggaaatatcacaacagtttctttaggagactttctttgggaagaagggccaaatagtttttctccgacaccggaatttttaaagttggctgtagatgttggcctgaagcaggagctagtttttgccgatcgcaaactgcctcgctatgtttattggaatggtcaattattaccagtgcccatgagtccaacagctatgctacagtctaaattactgagtgatgctggtaagctacgcgctttagttggcgctttgggttttgtctcacctgccattggtaatttatcaggacaaggaggagaagaaactgtatcccaatttttccagagacatcttggtcctgaagtaatgcagcgactggtggaacctttcgtttctggtgtttatgcaggagaccctagtcaactgagtgcttctgctgcttttgctaaagtggctcgaatggctgacttaggtggtggacttgtagctggtgctttgctgtctgctaaaaaaaatcgtaagtttaaggttgctcccgaccctaatattcctaagactaagactggtgaattgggttcttttcgaggtggtttggaggcattaccaaaagcgatcgcctcttatttaggagaagcagttaaattaaattggcatcttactaatattcgtcggactgaacaacaaacttatatagcagaattttctactcccaatggtcctgagcaaatagaaactcgtactatttccctttctactcccgctcgtgtttgtgcagaattattcaaaactttgcaaccggaaattgcttctatatttaatgaattttattatcctcctgttgcctgtgtagtcttggcatatcctgatacttctatcaaggttaagatagatggctttggtaatttgattcctagaggtcaaggtatccggactcttggtagtatttggtcttctactttattttctggtagaacacctccaggatggcaaatttttactaattttattggtggtgcaacagacccggaaattgcgaacttagatagtgaagcgatagtgcaacaggtacatcaagatctttgtcaaactctgttaaaacagaatgctgaacaaccaaaagttcttgcggtgcatttatggtctcgtgctattcctcaatataatttaggccataattctaaattggaggagattaataatggcttaaaatctttgcctggtctatatctgtgcagtaattatattggtggtatagctttgggagattgtgttcgccgtggcacagaagtagcgactgaaatttatcaaggtttgcagacttga

SEQ ID NO: 989 - DNA, 1435 bp, synthetic construct
  source 1..1435: mol_type = other DNA
  misc_feature 1..1435: note = Gene encoding SEQ ID NO: 910
atgactgaagttttagatgtcttagttgttggcgcaggtattagtgggttaagtttagcccatgcactgacaaaattaggtaataattccccgttaaagattttagttgcagaaagccaaaatcgagtggggggaaatatcacaacagtttctttaggagactttctttgggaagaagggccaaatagtttttctccgacaccggaatttttaaagttggctgtagatgttggcctaaaggaggagctaatctttgccgatcgcaaactgcctcgctatgtttattggaatggtcaattattgccagtacctatgagtccaaaagctatgctacagtctaagttactgagtgatggtggtaagttacgcgccctagttggtgctttgggttttgtatcgcctgctattggcgatctgtcagagcaagggggagaagaaactgtatcccaatttttccagagacatcttggtgctgaagtgatgcagcgactggtggaaccttttgtttctggtgtttatgcaggagatcctggtcaactgagtgctaatgcggcttttgctaaagtggctcgaatggctgacttaggtggtggacttgtcgctggtgctttgttgtctgccaaaaaaaatcgtaagttcaaggttgctcccgatcctaatattcctaagactaaaactggcgaattgggttcttttcgaggtggtttggaggcattaccaaaagcgatcgcttcttatttaggagaagcagttaaattaaattggcatcttactggtattcgccgcactgaacaacaaacttatatagcagaattttcgactcccaatggtactgagcaaatagaaactcgtactatttctctttctactcctgctcgtgtttgttcagagttattcacaactttgcaacctgaaattgcttctatatttaatgagttttattatcctactgttgcctgtgtagtcttggcatatcctgatacttctatcaaggttaagatagatggctttggtaatttgattcctagaggtcaaggtatccggactcttggtagtatttggtcttctactttattttctggtagaacacctccaggatggcaaatttttactaattttattggtggtgcaacagacccggaaattgcgaacttagatagtgaagcgatagtgcaacaggtacatcaagacctttgtcaaactctgttaaaacagaatgctgaacaaccaaaagttcttgcggtgcatttatggtctcgtgctattcctcaatataatttaggccataattctaaattggaggagattaataatggcttaaaatctttgcctggtctatatctgtgcagtaattatattggtggtatagctttgggagattgtgttcgcagtgggacagaagtagctactaagatttatcaaggtttacaagtga

SEQ ID NO: 990 - DNA, 1473 bp, synthetic construct
  source 1..1473: mol_type = other DNA
  misc_feature 1..1473: note = Gene encoding SEQ ID NO: 911
atgtctttcaccgatctggccactccatctcacccccttgatacgctcgttattggggcaggaattagcggtttaagtcttgcctttaccttgcaacaacggcagacccaagtattagtctgcgaaagtcaaaaccgcattggggggaatatcacaacgggtcaggcggatggttttctgtgggaggaagggccgaacagtttcgcgccgacacccgctcttttaaggctaattgtcgatgctggattagagaaagacatgattcttgccgaccggcgcttaccgcgttttgtgtacaggcaagggcgcttgcaagcgattcccatgagtcccccggcggcgattgggacgccgttactcagttggccgggtaaactcagggctggattgggtgccatcggttttgtccgccccccgttgggcgagcagttttctcaacaaggctcagaagagacggtggctcaatttttccagcgccacctcggtgaagaggtgatggaaaggctggtaacgccgtttgtctctggcgtgtatgccggagatgtgaatcaattgagtgcggcggcagcctttcggagaattgctcagttagagggcgttggcggcggtttagtggccggggcgattctctcgcggatgaaggccaaatctcagccgcaagtcccggtcgatccaagcttacctaaaacgcgacctggggagttagggtcatttcaacaagggttacaaatgctaccccaagcgctggcggccaaattaggcgatgcggtgcggttgaattggcggttgctgcaaattaccccaacaacgcgccaaagctatattgcagaattcggtaccccagagggaacgcagattgtagaagctcgccatgtggtgttgacaacgcctgcttatattaccgcagagattgtagaggcgatcgcgccccttgccagccaagctttgcgagcgattgagtatcccccggtggcaaacgtcgtcttagcctacccagaatcagccttgaagcagcctttaaagggatttgggcatttgattccgcgtagcgaaggaatccgcactctagggacaatctggtcgtctagcctgtttcccggacgagtccccccaggctggcagttactcaccaattatattggcggcgcaaccgatccaggcattttagacttagaccgcgattcgcgaagcaatctcgacgggaatcccattgctcaagccgttcaccaagatatccgccgcatcctcctccagcaagaggttcagcccaaggtgctagcggttcatctgtggaagcgggcgattccccaatataatctaggtcatcaccagcgcttgcaaaccattttccaaagtttggccccgttccccggtttgcatatttgcagcaactataccgatggggtagccctcggagattgcgtccgcagagcgcaagaactcgctgatatcttaacccaaaaaactcggtag

SEQ ID NO: 991 - DNA, 1470 bp, synthetic construct
  source 1..1470: mol_type = other DNA
  misc_feature 1..1470: note = Gene encoding SEQ ID NO: 912
atggaagcggcagtgaatcctgcaactcctgaaccccttaacgcggaggtggtggtcattggggcgggcatcagcggcctgacgctggcctggcgcctgcagcagggtttatcggctagggggggatcccctcaagcggtgctcctggcggaggccagctcccgcgtcggcggctgcatttccacccagtccaaagacggctactgctgggaggaaggccccaacagctttacccccacccctgccctgctcaacctcattgctgaggtgggcctgaccgaccaactggtgctggccgatgccaagctgccccgctacatctactgggagaaagagctgctgccggtgccgcttagccccgcggcagccctgagctcccggctgctcagtgtgggcggcaagctgcgggctctgcagggcctgctggggtttgtcccgccgccgccaggacgcgaggaaacggtgcggcagtttttccggcgacaactgggatccgaagtggccgagcgcctggtggagccctttacctcgggggtttatgcgggggatccggatcagctcagcgccgtggcggctttccctcgcgtggcgggcctggaggagcgctatggcagcctctttgccggcgccctgcaggctctgcgccaaagaccccagccttctcctgcggccatccaacccccgcccaaacggggccaactgggcaatctgaggcaggggctgcagcagttgccagaggccctagcccaaaagctgggcgacagcctgcggctgggctggcgagcggtgcagcttaagcgggagggagagctctattgggtgggctttgagacgccagagggatcccgctgggtggctgcccgccaggtggtgctggccctccccgcctacgaggctgccgcgctgctacaggagctcaaccccccggccagccagctcttggccgagatcctctatccgccggtggcggtggtggctctggcctatccccaagaggccctgccccagccgctgcggggctttggccacctcatcccccgttcccagggcctgcgcaccctgggcacgatctgggcctcctgcctttttccagagcgggctccccagggctaccacagcttcctcagcttcctgggcggcgccaccgatgcggccttggcccgccggcgggggatcccgcccatccctgcgctgtctcctgaggagcgagcgcaaattgcccacgccgagcttagccaggttctgctcacccgccgcgtcgagcccatctacctcggggaacgcctatggccccgcgccatcccccagtacacccttggccaccggcaacgcatagcccaggtgcaggcccacctggcctcccagacgccagggatctgggtatgcgccaactacctcgatggcgtggccctgggcgattgcgtgcggcgggccgaggcgctggcgcagcagctgttgtcccaggtctag

SEQ ID NO: 992 - DNA, 1470 bp, synthetic construct
  source 1..1470: mol_type = other DNA
  misc_feature 1..1470: note = Gene encoding SEQ ID NO: 913
atggaagcggcagtgaatcctgcaacccctgaaccccttaacgcggaggtggtggtcattggggcgggcatcagcggcctgacgctggcctggcgcctgcagcagggtttatcggctagggggggatcccctcaagcggtgctcctggcggaggccagctcccgcgtcggcggctgcatttccacccagtccaaagacggctaccgctgggaggaaggccccaatagctttacccccacccctgccctgctcaacctcattgctgaggtgggcctgaccgaccaactggtgctggccgatgccaagctgccccgctacatctactgggaaggagcgctgttgccggtgcctctgagccccgcggcagccctgggatcacggctgctcagcgtgggcggcaagctgcgggctctgcagggcctgctggggtttgtcccgccgccgccaggacgcgaggaaacggtgcggcagtttttccggcgacaactgggatccgaagtggccgagcgcctggtggagcccttcacctcaggagtctatgccggcgacccagatcaactcagcgccgtggcggctttccctcgcgtggcgggcctggaggagcgctatggcagcctctttgccggcgccctgcaggctctgcgccaaagaccccagccttctcctgcggccatccaacccccgcccaaacggggccaactgggcaatctgaggcaggggctgcagcagttgccagaggccctagcccaaaagctgggcgacagcctgcggctgggctggcgagcgctgcagctgaagcgggcgggagagctctattgggtgggctttgagacgccagagggatcccgctgggtggctgctcgccaggtggtgctggccctccccgcctacgaggctgccgcgctgctacaggagctcaaccccccggccagccagctcttggccgagatcctctatccgccggtggcggtggtggctctggcctatccccaagaggccctgccccagccgctgcggggctttggccacctcatcccccgttcccagggcctgcgcaccctgggcacgatctgggcctcctgcctttttccagagcgggctccccagggctaccacagcttcctcagcttcctgggcggcgccaccgatgcggccttggcccgccagcaagggatcccacccatccctgcgctgtctcctgaggagcgagcgcaaattgcccacgccgagcttagccaggttctgctcacccgccgcgccgagcccgtctacctgggcgaacgtctctggccccgcgccatcccccagtacacccttggccaccggcaacgcatagcccaggtgcaggcccacctggcctcccagacgccggggatctgggtgtgtgccaactacctggatggcgtggccctgggcgattgcgtgcggcgggccgaggcgctggcgcagcagctgttgtcccaggtctag

SEQ ID NO: 993 - DNA, 1470 bp, synthetic construct
  source 1..1470: mol_type = other DNA
  misc_feature 1..1470: note = Gene encoding SEQ ID NO: 914
atggaagcggcagtgaatcctgcaacccctgaaccccttaacgcggaggtggtggtcattggggcgggcatcagcggcctgacgctggcctggcgcctgcagcagggtttatcggctagggggggatcccctcaagcggtgctcctggcggaggccagctcccgcgtcggcggctgcatttccacccagtccaaagacggctaccgctgggaggaaggccccaatagctttacccccacccctgccctgctcaacctcattgctgaggtgggcctggccgaccaactggtgctggccgatgccaagctgccccgctacatctactgggaaggagcgctgttgccggtgcctctgagccccgcggcagccctgggatcacggctgctcagcgtgggcggcaagctgcgggctctgcagggcttgttggggtttgtcccgccgccgccaggacgcgaggaaacggtgcggcagtttttccggcgacaactgggatccgaagtggccgagcgcctggtggagcccttcacctcaggagtctatgccggcgacccagatcaactcagcgccgtggcggctttccctcgcgtggcgggcctggaggagcgctatggcagcctctttgccggcgccctgcaggctctgcgccaacgaccccagccttctcctgcggccatccaacccccgcccaaacggggccaactgggcaatctgaggcaggggctgcagcagttgccagaggccctagcccaaaagctgggcgacagcctgcggctgggctggcgagcgctgcagctgaagcgggcgggagagctctattgggtgggctttgagacgccagagggatcccgctgggtggctgctcgccaggtggtgctggccctccccgcctacgaggctgccgcgctgctacaggagctcaaccccccggccagccagctcttggccgagatcctctatccgccggtggcggtggtggctctggcctatccccaagaggccctgccccagccgctgcggggctttggccacctcatcccccgttcccagggcctgcgcaccctgggcacgatctgggcctcctgcctttttccagagcgggctccccagggctaccacagcttcctcagcttcctgggcggcgccaccgatgcggccttggcccgccagcaagggatcccacccatccctgcgctgtctcctgaggagcgagcgcaaattgcccacgccgagcttagccaggttctgctcacccgccgcgccgagcccgtctacctgggcgaacgtctctggccccgcgccatcccccagtacacccttggccaccggcaacgcatagcccaggtgcaggcccacctggcctcccagacgccggggatctgggtgtgtgccaactacctggatggcgtggccctgggcgattgcgtgcggcgggccgaggcgctggcgcagcagctgttctcccaggtctag

SEQ ID NO: 994 - DNA, 1470 bp, synthetic construct
  source 1..1470: mol_type = other DNA
  misc_feature 1..1470: note = Gene encoding SEQ ID NO: 915
atggaagcggcagtgaatcctgcaacccctgaaccccttaacgcggaggtggtggtcattggggcgggcatcagcggcctgacgctggcctggcgcctgcagcagggtttatcggctagggggggatcccctcaagcggtgctcctggcggaggccagctcccgcgtcggcggctgcatttccacccagtccaaagacggctaccgctgggaggaaggccccaatagctttacccccacccctgccctgctcaacctcattgctgaggtgggcctggccgaccaactggtgctggccgatgccaagctgccccgctacatctactgggaaggagcgctgttgccggtgcctctgagccccgcggcagccctgggatcacggctgctcagcgtgggcggcaagctgcgggctctgcagggcttgttggggtttgtcccgccgccgccaggacgcgaggaaacggtgcggcagtttttccggcgacaactgggatccgaagtggccgagcgcctggtggagccctttacctcgggggtttatgcgggggatccggatcagctcagcgccgtggcggctttccctcgcgtggcgggcctggaggagcgctatggcagcctctttgccggcgccctgcaggctctgcgccaaagaccccagccttctcctgcggccatccaacccccgcccaaacggggccaactgggcaatctgaggcaggggctgcagcagttgccagaggccctagcccaaaagctgggcgacagcctgcggctgggctggcgagcgctgcagctgaagcgggcgggagagctctattgggtgggctttgagacgccagagggatcccgctgggtggctgcccgccaggtggtgctggccctccccgcctacgaggctgccgcgctgctacaggagctcaaccccccggccagccagctcttggccgagatcctctatccgccggtggcggtggtggctctggcctatccccaagaggccctgccccagccgctgcggggctttggccacctcatcccccgttcccagggcctgcgcaccctgggcacgatctgggcctcctgcctttttccagagcgggctccccagggctaccacagcttcctcagcttcctgggcggcgccaccgatgcggccttggcccgccggcgggggatcccgcccatccctgcgctgtctcctgaggagcgagcgcaaattgcccacgccgagcttagccaggttctgctcacccgccgcgccgagcccgtctacctgggcgaacgtctctggccccgcgccatcccccagtacacccttggccaccggcaacgcatagcccaggtgcaggcccacctggcctcccagacgccggggatctgggtgtgtgccaactacctggatggcgtggccctgggcgattgcgtgcggcgggccgaggcgctggcgcagcagctgttctcccaggtctag

SEQ ID NO: 995 - DNA, 1470 bp, synthetic construct
  source 1..1470: mol_type = other DNA
  misc_feature 1..1470: note = Gene encoding SEQ ID NO: 916
atggaagcggcagtgaatcctgcaactcctgaaccccttaacgcggaggtggtggtcattggggcgggcatcagcggcctgacgctggcctggcgcctgcagcagggtttatcggctagggggggatcccctcaagcggtgctcctggcggaggccagctcccgcgtcggcggctgcatttccacccagtccaaagacggctaccgctgggaggaaggccccaatagctttacccccacccctgccctgctcaacctcattgctgaggtgggcctgaccgaccaactggtgctggccgatgccaagctgccccgctacatctactgggaaggagcgctgttgccggtgcctctgagccccgcggcagccctgggatcacggctgctcagcgtgggcggcaagctgcgggctctgcagggcctgctggggtttgtcccgccgccgccaggacgcgaggaaacggtgcggcagtttttccggcgacaactgggatccgaagtggccgagcgcctggtggagcccttcacctcaggagtctatgccggcgacccagatcaactcagcgccgtggcggctttccctcgcgtggcgggcctggaggagcgctatggcagcctctttgccggcgccctgcaggctctgcgccaaagaccccagccttctcctgcggccatccaacccccgcccaaacggggccaactgggcaatctgaggcaggggctgcagcagttgccagaggccctagcccaaaagctgggcgacagcctgcggctgggttggcgagcgctgcagctgaagcgggcgggagagctctattgggtgggctttgagacgccagagggatcccgctgggtggctgcccgccaggtggtgctggccctccccgcctacgaggctgccgcgctgctacaggagctcaaccccccggccagccagctcttggccgagatcctctatccgccggtggcggtggtggctctggcctatccccaagaggccctgccccagccgctgcggggctttggccacctcatcccccgttcccagggcctgcgcaccctgggcacgatctgggcctcctgcctttttccagagcgggctccccagggctaccacagcttcctcagcttcctgggcggcgccaccgatgcggccttggcccgccggcgggggatcccgcccatccctgcgctgtctcctgaggagcgagcgcaaattgcccacgccgagcttagccaggttctgctcacccgccgcgccgagcccgtctacctgggcgaacgtctctggccccgcgccatcccccagtacacccttggccaccggcaacgcatagcccaggtgcaggcccacctggcctcccagacgccggggatctgggtgtgtgccaactacctggatggcgtggccctgggcgattgcgtgcggcgggccgaggcgctggcgcagcagctgttctcccaggtctag

SEQ ID NO: 996 - DNA, 1458 bp, synthetic construct
  source 1..1458: mol_type = other DNA
  misc_feature 1..1458: note = Gene encoding SEQ ID NO: 917
atgagtgaaccagcgaatccatctaccttactcgataccctcgtcgtcggtgcgggcattacgggcctgacgcttgcattcgacttgcaacagaaatcgagcggcaccgcccattcagcgaaagttctcgtcgccgaaagtcaagctcgggtgggaggtcgcatcgttaccgcatcgggagatggttttctctgggaagaaggccccaacagttttgcgccgaccccagagttattacaattagccgttgaagtcggcttaaaagataaattagtcttcgccgacggcaaactccctcgcttcgtctactggcagggagaattaatgcccgttcccatgagtccccctgccatcattagctcaaaactgcttacttggcgggggaaactgcgcgcattcttcggtgctttggggtttgtccccccggcaatggccgatgtgggttccgaggaaactgtcgcctccttcttcgagcgccatttgggccgcgaagtgctgcagcgcttagtcgaaccgttcgtgtccggggtctatgccggagatccgcgacagttaagcgcccgagcggcatttgggcgtgtggcgcgcatggcagaagcagggggcggactggttgcgggagcagtccgcacgagccgccagaaaccgaaaacgaaagtcaccccagatccgaacgtcccgcagcccaaacggggacagctcggttcttttcgtcaaggattggcgactttgcccgaggcgatcgccgatcgcctcggagacgcagtccaactcaactggcacttaattcgcgtgcgccccaccgaacgacacacctacattgccgagttttcgacgccggacggtccgaagcgggtagaagcgcgcagtgtggtcttgaccaccccaacttacgtgacggctgatttattcgatcccctccacggggagattgcccgggccttacggggatttgtctatccgtcagtggcttgtgtggtgttgggatatcccacttcggcgttgaaacgcccgttaaatggttttgggaatttgattccccgaaatcaggggattcgcaccctggggacgatttggtcttcgtccttgttttccgggcgggcgccggagggttggaatttgttgattaattttattgggggcacgggggatccggcgatcgccgagttagagaaagacgagatcgttcgggtcgtgcatcgagatttactcaaaacgctgctcgcgcgagatgtagacccgaaggtgttggcagttcatctctggaagcgggcaattccccaatattgcttgggtcaccaccagcgctgggagcagatcgatcgcggcttgcaggagtttcccggtctttacttgtgtgggaattacagtgacggggtagcggtgggcgattgcgttcgtcgcgcgcgagatcgcgctgcggagatccgccaatatttggcctcggcgacggtctaa

SEQ ID NO: 997 - DNA, 1407 bp, synthetic construct
  source 1..1407: mol_type = other DNA
  misc_feature 1..1407: note = Gene encoding SEQ ID NO: 918
atgttagacagtctgattgtgggggccggtctcagtggcttgaccgttgcccataccttgcagcagcgcgatcgcaatattctcgtcgcggaagctagccccgatgtggggggcaatattattagccgccaacagggtgaatttctctgggaggagggcccaaacagttttcaaccgaatccgaccctgctcaaattggcggtggatgtgggactaaaggatgacctcgtctttgccgatcgcaaactgccccgctgggtctattggcaaggtcgtctcttggctgtacccatgagtccggggactgcggtgcgatcgcccctgctgagtgtgccggggaaactgcgggccctgttcggggcgctggggtttgtgccgcccttggtcggaagccacattcaggcccaaggcggcgatgaaaccatttggcaatttattaaccgtcatttaggcccagaagtggccgagcggctgatttcgccctttgtgtcgggggtctatgctggggatgtccacgccctgagtatggcggcagcctttcggaaaatttatcgcctcgaaaccctgggcggtggccttgtggcgggggcgatgcgatcgcggcggcaaggtaaagccgatcgccccgctgttgatcccaatctgcccaccacgaagccgggccagttggggtcatttcgcgagggcatggtgatgctacccaacgcgatcgctgctcgattgggcgatcgcctccgctgccgctggacgctgacccagatcgaaccgttggaacagggctatcgcgcccattttgacacccccgacggcggccaaaccatcgagacgcgcaccctcgttttggcgattcctgcccatcgagtggcccccctcctcgcgcccctgatgccggagttaagcaccacattacaagcgattccctatcctgccgtagcctgtaccgtgatggcctatcccaaaacggcgttggtgcgatcgctccacggctttggcaacctcaacccccgcagccaaggtatccgcacccttggcaccatctggtcatccaccctcttccccggtcgtgcgcccgaaggttgggtgatgttgagtagttttatcggtggctccactgatccggcggtggcgacgatggatgaaggcgcgatcgcccaagccgtccaccaagacctcagtaacattctcgtcaaacccgacagcaccccgaaagtcctcgccgtcaaactctggtcaaaagcgattccccaatacaccctagggcattgcgatcgcctctccgtcatggccgaacacctcaaagcccacccccacctcaccctatgcagcaactacaccgacggtgtcgccctcggtgactgcatccgacgcggcatcgaagcgggagaagcgatcgatcagcaactctaa

SEQ ID NO: 998 - DNA, 1392 bp, synthetic construct
  source 1..1392: mol_type = other DNA
  misc_feature 1..1392: note = Gene encoding SEQ ID NO: 919
atggtagagactttaattgtcggagcaggaattagtggtttgaccactgcttatcggttacatgagcaacaacatgaggtgatggtagccgaaaagaacgatcgagcagggggaaacattaccagcaaagccagtgggggtttcctctgggaagaaggacccaatagcttttctccgaccccagaattgctaaaactggcggtagatgtcgggttaaaagatgagttcgtatttgccgatccgacgcttccccgttatgtttattggcaggggaaactacttcctgttcccatgagtcccccatcggcggtaaaatcacagttgttgagtccattggggaaactgcgagcgttaacgggtgcgatcgggtttgttcccccaaaggtggcgactgaagaagaaacagtggcggaatttttcacccgtcatttgggttcggaagtggcgcagcgattggtgagtccttttgtttctggggtgtatgctggagatgtggcaaacttgagtgcttcggcagcttttggacgagtgacgcaattggcggatgtgggaggcggactggttgctggggcaattttatctcgtggcaagaaaaaaaaggcaaccactgaggttgatccagagattcccaaaacgcgatcgggagaattaggatcatttcgagaagggttacagcaattaccaagctcgatcgcccgtaaattaggagaggcggtaaaattcaattgggaactaaaacagatttcccagacttcagaagcgggctacattgccactttttccaccccagaaggagaacaaaacgtggaagcgcagcaaatcatcctcacgactcctgcttatgttagcgctccaattttacaagacttatccccagaagcgagtcaagcgctgagagaaatttattatccgccagtagcttgtgtggttctcgcgtatcccgatgaagccttcagtgtgccattagacgggtttggtaatctcaatccgcgtagtgaaggagtccgtactttaggaacaatttggtcttctactttgttttctggacgtactcctcaaggttggcagattctgactaattttatcggcggcgcaactgatcctgaaattgctcaactcagtgaagaagagattgttcaacaagtccatcaagacttacagaaaaccatagttaaaccgaatacgacaccgaaacccctagcggttcatttatggtcgcaagcgattcctcaatatacccttggacatctcgatcgaatcgcgagaattaaagagagtttgaaaccgttttcggggctatttttatcgagtaactatcttgatggcgttgcgttaggagattgtgtgcggcgcggggaagaaacagcagcccagattcttaataaaaagtag

SEQ ID NO: 999 - DNA, 1386 bp, synthetic construct
  source 1..1386: mol_type = other DNA
  misc_feature 1..1386: note = Gene encoding SEQ ID NO: 920
atggtagagactttaattgtcggagcaggaattagtggtttgaccactgcttatcggttacatgagcaacaacatgaggtgatggtagccgaaaagaacgatcgagcagggggaaacattaccagcaaagccagtgggggtttcctctgggaagaaggacccaatagcttttccccgaccccagaattgctaaaactggcggtagatgtggggttaaaagatgagttcgtatttgccgatccgacgcttccccgttatgtttattggcaggggaaactacttcctgttcccatgagtcccccagcggcggtaaaatcgcaactactgagtccattggggaaactgcgagcgttaacgggtgcgatcgggtttgttcccccaaaggtggcgactgaagaagaaacagtggcggaatttttcacccgtcatttaggctcggaagtggcgcagcgattggtgagtccttttgtttctggggtgtatgctggagatgtggcaaacttgagcgcttcggcagcttttgcacgagtgacgcaattggcggatgtgggaggcggattggttgctggggcaattttatctcgtggcaagaaaaaaaaggcaaccactgaggttaattcagagattcccaaaacgcgatcgggagaattaggatcatttcgagaagggttacagcaattaccaagctcgatcgcccgtaaattaggagaggcggtaaaattcaattgggaactaaaacagatttcccagacttcagaagcgggctacattgccactttttccaccccagaaggagaacaaaacgtggaagcgcagcaaatcatcctcacgactcctgcttatgttaacgctccaattttacaagacttatccccagaagcgagtcaagcgctgagagaaattgattatccgccagtggcttgtgtggttctcgcgtatcccgatgaagccttcagtgtgccattagacgggtttggtaatctcaatccgcgtagtgaaggagtccgtactttaggaacaatttggtcttctactttgttttctggacgtactcctcaaggttggcagattctgactaattttatcggcggcgcaactgatcctgaaattgctcaactcagtgaagaagagattgttcaacaagtccatcaagacttacagaaaaccatagttaaaccgaatacgacaccgaaacccctagcggttcatttatggtcgcaagcgattcctcaatatacccttggacatctcgatcgaatcgcgagaattaaagagagtttgaaaccgttttcggggctatttttatccagcaactatcttgatggcgttgcgttaggagattgtgtgcggcgcggggaagaaacagcagcccagattcttagataa

SEQ ID NO: 1000 - DNA, 1404 bp, synthetic construct
  source 1..1404: mol_type = other DNA
  misc_feature 1..1404: note = Gene encoding SEQ ID NO: 921
atgggctcccacacccccgatattttgattctcggcgcaggcatcagtggcctatccgctgccttccgactccaccaacagcaacaagatctattggtggccgagcgcgccgagcgcgttggcggcgtcatcaccacccgcgctcaagacggctttcgctgggaagaaggccccaacagcttcaccccctcccccgccctcctcaacctcatcgccgacgcaggcattgccgatcgcctcctgtgggcagatggcaagttaccccgcttcgtctacctcgaaggcaaactcaccctcgttcccatgactcccccagacttaatcaagtccaacctgctcagctttggggctaagctgcgcgccttattgggcattctcggctttacagccaaagcccccgacaaagaagagaccgtcgaagaattctttgcccgccaactggggcctcaggtggtcgagcgcttggtcggccccttcacctccggcgtctatgcaggcgacacgcagcaactgagcgccacagccgcgttctccaaagtggcggatctagaacgtaaatacggcagcattattgccggcatcatccgctcccccaaatcccccaaaccccccatctccgcaaaaatcgaccccctgcccaaacgcggccagctcggtaattttgtggagggattgcaggaattgcccgacgcgatcgcccagcagctcggcgatgccgtcaagctgcagtgggaagcggctgagattgtcaaagaaggcgatcgctaccgcaccactttccaaacccccagtggcccccaaaccgtctcctccaaagccatcctgctcgccgtccctgcctaccgtgccgcccccctactcaaatccctcgacactgcccttgccgacgaactcgctgccattccctatccccacgttggggccgttaccctggcctaccccgccgatgccctgcctcaacctttcgccggattcggccaactcttcccgcgcggccaaggcatccgcaccctcggcaccatctggacctccagcctcttccccggccgcgccccggcaggctatcaatgcaccctcagctacatcggcggtgccaccgaccctgacattgctcaaatgacggacgaagccttagctcgaacggtccaccaagacctgagcaaaactctgttggtgaaagaagctgaaccgcgcgtcatgggcgtacgccgctggccccgcgccattcctcaatacaccctcggtcaccgacagcgccttgcccgcattgacgaattgctcgcagactattccggcttggtgttgtgtaccaattacttggatggcgtggcattgggcgattgtgtcaggcgaggagaggctcgggcagcggatttggtggaatggctggcacaagctgagtag

SEQ ID NO: 1001 - DNA, 1455 bp, synthetic construct
  source 1..1455: mol_type = other DNA
  misc_feature 1..1455: note = Gene encoding SEQ ID NO: 922
atgacaaacctagttgatagccttattgttggtgctggtattagtgggctgagtttagcctatagtcttaaccgtgaaaaaagtgtgcgcgaacctctaaaggttttggttacagaaagccagaaccgagtcgggggaaatattacaaccggacgggctgatgattttttatgggaagaaggccctaacagttttgcccccacccctgaattactcggactagccgtagatttagggctcaaagaagaattgatttttgccgatcgcaaactaccccgttatgtgtactggaacctaatgttacatccagtacccatgaacccccccgccctactctcctccgaactcatcagcgccagaggtaaactccgcgccgcattaggagccataggatttgtgccacccccagtaggcgctcacctctctcaacagggaggagaagaaactatcacccagtttttcgatcgccatttaggttcagaagtcctagaacgtctcgtccagcccttcgtttcaggggtttatgctggcgaccctcaacagttagcagtccgttccgcttttagtcgcatagtagccgctgaggaggctgggggggggctactacctggatttgtgcgatcgcgtctgaataaaaaagcccccgtctctacccccgaccccaacattcccaaaactcgccccggtgaattagggtccttccgttatggtctgcaaactctaccagaaaccttagccagcaaattaggcgatcgagttaagttaaattggactatcgaccgtttttatcccaccgatcatcaaacctatattgctgaattttccaccccagacggtcctcagcaagtagaagcccgaacccttgccttaatgacccccgcccatgttagcgctcgcctgttgcaacccctacactctcccatcgctaccgcattaagccaaattccctatccccccgtcgcttgtgtagtcctcgcctatcccaaatcagccttaaaacaacaactcaaaggctttggtaatttaattccccgccgtcaaggaatccgtacccttggcactatttggacctcaagtttatttcccggtcgcgccccagaatcttggcaagtcctcagcaattatattgggggtgcaacagacccggaaattggcgaaatggatgatgatcaaattgtcgccgccgttcatcaagacctacgccaaattctgctggctgaagatgtcccccccaaggtcttagctgttcatctttggcggcgcgctatcccacaatatactctcggtcatcagaaccgcctaaattgcatcgatgctggattgcgatcgyttcccggactttatctgtgtagcaactatattgatggggtttccgtcggagactgtgtgaggcgcggtcagcaatgggcatctaaaattcagtcccatcttcatgactgccaaacagccaactaa

SEQ ID NO: 1002 - DNA, 1455 bp, synthetic construct
  source 1..1455: mol_type = other DNA
  misc_feature 1..1455: note = Gene encoding SEQ ID NO: 923
atgacaaacctagttgatagccttattgttggtgctggtattagtgggctgagtttagcctatagtcttaaccgtgaaaaaagtgtgcgcgaacctctaaaggttttggttacagaaagccagaaccgagtcgggggaaatattacaaccggacgggctgatgattttttatgggaagaaggccctaacagttttgcccccacccctgaattactcggactagccgtagatttagggctcaaagaagaattgatttttgccgatcgcaaactaccccgttatgtgtactggaacctaatgttacatccagtacccatgaacccccccgccctactctcctccgaactcatcagcgccagaggtaaactccgcgccgcattaggagccataggatttgtgccacccccagtaggcgctcacctctctcaacagggaggagaagaaactatcacccagtttttcgatcgccatttaggttcagaagtcctagaacgtctcgtccagcccttcgtttcaggggtttatgctggcgaccctcaacagttagcagtccgttccgcttttagtcgcatagtagccgctgaggaggctgggggggggctactacctggatttgtgcgatcgcgtctgaataaaaaagcccccgtctctacccccgaccccaacattcccaaaactcgccccggtgaattagggtccttccgttatggtctgcaaactctaccagaaaccttagccagcaaattaggcgatcgagttaagttaaattggactatcgaccgtttttatcccaccgatcatcaaacctatattgctgaattttccaccccagacggtcctcagcaagtagaagcccgaacccttgccttaatgacccccgcccatgttagcgctcgcctgttgcaacccctacactctcccatcgctaccgcattaagccaaattccctatccccccgtcgcttgtgtagtcctcgcctatcccaaatcagccttaaaacaacaactcaaaggctttggtaatttaattccccgccatcaaggaatccgtacccttggcactatttggacctcaagtttatttcccggtcgcgccccagaatcttggcaagtcctcagcaattatattgggggtgcaacagacccggaaattggcgaaatggatgatgatcaaattgtcgccgccgttcatcaagacctacgccaaattctgctggctgaagatgtcccccccaaggtcttagctgttcatctttggcggcgcgctatcccacaatatactctcggtcatcagaaccgcctaaattgcatcgatgctggattgcgatcgcttcccggactttatctgtgtagtaactatattgatggggtttccgtcggagactgtgtgaggcgcggccagcaatgggcatctaaaattcagtcccaccttcatgactgccaaacagccaactaa

SEQ ID NO: 1003 - DNA, 1452 bp, synthetic construct
  source 1..1452: mol_type = other DNA
  misc_feature 1..1452: note = Gene encoding SEQ ID NO: 924
atgacaaacctagttgatagccttatagttggtgctggtattagcgggctaagtttagcccatagcctgaaccgtgaaaaaaacccccgctcacccctaaaagttttggtcacagaaagccagaaccgagtcgggggaaatattacgaccggacgcgcatctgattttttatgggaagaaggccctaacagttttgcccccacccctgaattactcggactagccgtagatttggggcttaaacaagaattgatttttgccgatcgcaaactaccccgttatgtctactggaaccataagttacatccagtacccatgaccccccccgccctactctcctcccaactaatcagccccagaggtaaactccgcgccgccttgggagccataggatttgtgccacccccagtaggcgctcacctctctcaacagcgaggagaagaaactattacccagtttttccatcgccatttaggttcagaagtcctagaacgtctcgtccagcccttcgtttctggggtttatgctggcgaccctcaacagttagcagtgcgttccgcctttagtcgattagtagccgccgaagacgcagggggtgcgctactacctggatttgtgcgatcgcgccttaataaaaaagccaccaaagacaccaccgccgaccccaatattcccaaaactcgccccggtgaattagggtccttccgttatggcctggaaactctgcccgaaaccttggccagtaaattaggcgatcgagttaagttaaattggaccctcgaccgtttttatcccaccgatcatcaaacctatattgctgaattttccaccccagacggcccccagcaagtagaaacccgaaccctcgctttaatgacccccgcccatgttagcgctcgcctcttgcaacccctacactctcaaatcgcttccgcattaagccaaattccttatccccccgtcgcttgtgtcgtactcgcctatcctaaatcagccttaaaacaacaactcaaaggctttggtaatttaattccccgccatcaaggaatccgtaccctcggcactatttggacctccagtttattccccggtcgcgccccagaatcttggcaagtcctcagcaattatattgggggtgctacagaccctgaaattggcgaaatggatgatgatcaaattgtcgccgccgttcatcaagacctacgccaaattctgctggctgaagatgtcccccccaaagtcttggctgtccatctctggcggcgcgctatcccacaatatactctcggtcatcaagatcgcctaaattccatcaatgctggattgcgatcgcttcccggactttatctgtgtagcaactatattgatggggtttccgtcggtgactgtgtgaggcgcggtcagcaatgggcatcgcaaattcagtcccaccttcatccaacagccaactaa

SEQ ID NO: 1004 - DNA, 1437 bp, synthetic construct
  source 1..1437: mol_type = other DNA
  misc_feature 1..1437: note = Gene encoding SEQ ID NO: 925
atgaccatcacgccaccctctgagaacaatcaacccatagatgtccttgtcgttggggcaggaatctcaggattaacgatcgcccatgaactagcgatctctaaaaaatatagcgtcttggtagcagaagcacaggatcgtgtgggtggagccataaccagtgccaaaaatgacgaaggttatcaatgggaagagggcccaaatagtttccaacccgctcctgaactattgcgtctagcggtacaggtaggactcaaggatgaattggtgctagctgatggcaaattaccccgtttcgtttttctaaatgggaagttaaacgccttaccgatgactccagcgagtgcgatcgcatctaaaatattgacttggggcggcaagattcgtctagctctaggtgcaatcggctttgcgcgtccagccatggctggagaagaatccgttgatcaattcttttcacgtttgctaggcagacaagcagttgaaagattagttgcaccgtttatctcaggtgtatacgcaggcgatcccaagcgactcagtgccaaggctgccttttctaagattgctcgtctagaaacctatggtgggttaatcgcaggcgcaatattatctagcaaacaacggaaagccgaaaagattaatgatccgaatattcccaaaactaaagctggtgaactaggttcatttcgtcaaggtataaaaatgctgcctgaagcgatcgctaccaagttaagagagcaaggttcagccatcaaacaacaatggactttgcgatcgctggaaaaacaaggcgaagtctatatttctaagttcgatacacccacgggtgaagaaactgtgacatcgcgatcgattgttctcgctaccccagcctatgtcacggcaaaattactgcaagattacttgccagccgccagtcaagccttgaatgagattttctatccgaccgttgcttgtgtggtacttgcttatcctaagagcgaatttgcctatgatatgaagggctttggcaatctgattccccgcactcaaggagtaagaactttaggcactatctggtcatcgagcctatttactggacgtgctccagaaggttggcaactattactaaactttattggcggcacgcttgatcccgctctagccaaactttcggaaccagaaatcattgccgctgtgcatcaagatttaaagaaaacaattcttcgacctgacacgaaagccgaaccaaaagcgatcgcagttcatgtatgggataaagcgatcccccaatacgaaatcggacatttagaaaggcttgccattgtggaagcagaattacagaaatctcaaggactttatgtcagtgccaattttatcggaggtgtggctctaggtgactgcatcaagcgtagtttgcaagaagccaataaaattgatgcatatctaaagtaa

SEQ ID NO: 1005 - DNA, 1437 bp, synthetic construct
  source 1..1437: mol_type = other DNA
  misc_feature 1..1437: note = Gene encoding SEQ ID NO: 926
atgacctccgcccagattcctgaagttaatccattagatgttcttgtcgttggggcagggatttcaggtttaacgatcgcccatgaattagcgatcgctaaaaactatcgcgtcttggtggcggagacacaggatcgggtgggcggcgcaattactagcgccaaaaatgacgatggctatcaatgggaggaaggacctaatagcttccagccagcccccgaattattacgtttagccgtagaagtcggactcaaggatgaattggtgcttgcggatggcaaactaccccgttttgtatttctcaacggcaagttaaacgctttgcccatgtctccgccaacggcgatcgcttcccgaattttgacttggggaggcaaaatccgtctcgctttaggggcaatgggttttgcacgtcctgcaatggcgggagaagaatccgtcgatcgcttcttttcgcgcctgttaggcagacaagcggtcgatcgcttggttgcccccttcatttctggagtatatgcgggcgatcccaagcggctcagtgccaaggctgcctttgccaaaatcgccaagctggaaacctatggcggtttgcttgctggggcaatattatcgagtaaagagcgcaaacaaaaacttaacgatcctcgcattccgaaaacgaaggcaggggagttaggttcctttcgcgagggcataaagatgctccctgaagcgatcgccgctaaattaagggcacagggtacagccgttaaacaacaatggactctgcgatcgctagagaagcaaggcggaatctatatttccaaatttgataccccaacgggcgaagaaattgtgacctcgcgatcggtcgttctttccacccctgcctatgtcactgcaaaattattacaagattatttacccgccgccagccaagccttaaatgagattttttatccgacggtagcctgtgtcgtgcttgcctatcccaaaagcgaatttctctatgacatgaaaggctttggcaatttgattcctcggacagagggagttagaaccctagggacaatttggtcatctagcctcttttcaggacgcgcccccgcaggttggcaactattgctcaattttatcggtggcaccctcgatcccgcactagcccatttatctgaagccgaaatcattgctgccgtgcatcaagatctcaaaaaaacgattcttcgccccgatacgaaggtatctcccaaagcgatcgccgttcatgtgtgggataaggctattcctcaatacgaaatcgggcatttagagcgccttgccacggtggaagccgaattgcaaaaatcctcagggctatatgtcagtgctaattttattggcggagtcgccttaggtgactgcatcaagcgcagcttgcaagaagctcataaaattgcggcttttttagaaaccatttag

SEQ ID NO: 1006 - DNA, 1440 bp, synthetic construct
  source 1..1440: mol_type = other DNA
  misc_feature 1..1440: note = Gene encoding SEQ ID NO: 927
atgacttctgctcaaaccaccgaagttaatcaacccttagatgttcttgttgttggggcaggaatttctggtttagcgatcgcccatgaactcgcgattgccaaaaattaccgtgttttagtagcagaagctcaagatcgcgttggtggtgcaattaccagtaaccgtaatgatgacggctatctctgggaagaggggcccaatagctttcagcctgcaccagagttattgcgtctagccgtagaggtagggctcaaggatgaattggtacttgccgatggtaagttgccgcgatttgtatttctcaatggcaagttaaatgcgttgccgatgagtccacctaccgcgatcgcctccaaaatcctgacttggggcggcaagattcgcctagctctgggtgcattaggttttgcgcgtcctgccatgagtggtgaggaatctgttgaccaatttttttcgcgcctcttaggtaagcaagcagtggagcgcttagttgccccttttatctctggggtctatgcgggtgatccaaagcgtctcagtgctagagctgcattttctaaaattttccgtctcgagaatggctatggtggtttgctcacaggggcaatcctgacggcaaaagatcgcaaagcccaaaagctgaacgatccgaatattcccaaggtgaagtctggtgaactaggttctttccgacaaggcattaaaatgctgcccgaagcgatcgcaaccaaactcagagatcaaggtacggctgtcaaacaacaatggactttgcgatcgctagaaaagcaaggcgaaatctatgtttctcagtttggtacgcctactggtacagaaacaattacttcgcgatctgtggtattgactaccccagcctatgtgagcgccaagttattgcagggctatttacctgctgcaagccaagccctgagcgagattttctatccgaccgtggcatgtgtcgtacttgcctatcccaaaagcgaatttgcttatgacatgaagggattcggtaatctcattccccgcacgcaaggtgtaagaactcttggaacaatttggtcatccagtctatttgcagggcgggctcctgatggttggcaattattgctgaactttataggtggtactcttgatccagatttagcaaatctttcggaagcgaagatcgttcaagcagtacatcaagatctcaagaaaaccctgctacgtcctgatagcaaagtcgaacccaaggtgatcgctgtacatgtgtgggacaaggcaattcctcagtatgaaatcggacatttagagcgtcttgccactatcgaaactgaattgcaaaagtcacagggtttgtatgtcagcgcgaattttattggtggtgttgcgcttggtgattgcattaagcgtagcctccaagaagcagataaaattgcagcatttttgaagtaa

SEQ ID NO: 1007 - DNA, 1536 bp, synthetic construct
  source 1..1536: mol_type = other DNA
  misc_feature 1..1536: note = Gene encoding SEQ ID NO: 928
atgaactcttctgttgagcactttagcgggacgcagtccttgcaggccgaggtggtggtggtgggggcgggcatcagcggcctaacgttggccttgcgattacaacagggcttatcccccaaggatgaatccacccagccgctgctcctggccgaggccagctcccgcgtggggggctgtatctccacccaatccaaagacagctatcgctgggaagagggccccaacagctttacccccgtccccgccctgcttaacctcattgccgaggtgggcttggcggagcacctggtgctggccgatgccaagctgccccgctacatctactgggaaaaagagctgctgccggtgcccctgagcccttctgcagccattggctcgcggctgttgagcgtgggcggcaagttgcgggccttacgtgggttgttggggtttgtcgcgccgccgccaggcggagaggaaacggtgcggcaattcttccggcggcaactgggatccgaggtggtggaacggctggtcgaacctttcacctcaggggtgtatgccggggatccggatcagctcagcgccttggcagccttcccccgcattgccggcttggaagaacgctacggcagcctctttgccggtgctgtgcaggctttgcgcagccgttatcgctacgcgacgctcccgcgaacccgtcaccaggacagcgccaactcccccatccagcctcctcccaagcggggccaactgggtaacctgcggcaggggttgcagcagctacctgaggcgattgcccagaaactgggcagtgcgctgcggctgggctggcgggctgtgcatctcaagcgggatgagacgggctaccgggtgggcttcgtcatacacgacagcggcgcggagcacacggccccagaagaaatccactgggtggcggctcaacaggtggtgctcaccctccctgcctacgctgctgccaccctcctgcaggatctcaacccccaggccagccggctgctgagggaaatcccctacccgcctgtggcggtggtggctttggcctatccagaagaagccctcccccaaccgctgcgagggtttggccatctgatccctcgctctcagggcctgcgcaccctgggcaccatctgggcctcctccctcttcccagagcgggctcctcagggctatcactgcctgatcagcttcatcgggggagctaccgatgcggcttttgcccgccagaaagggatcccgcccattacggcgctctcccctgacgagcgggcccaaattgtgcatgcagaactcagccagatcctgctcacccgccctgtcgaacccatccgcctgggagagcgcctgtggccccaggctatcccgcaatatacgcttggccaccggcagcggattgcccaattgcaggccagcctggccgaccaaaccccaggggtgtgggtgtgtgccaactacctggatggcgtggccttgggagattgtgtgcggcgggccgaggccctagcccagcagatcctgtccgtccggcgttag

SEQ ID NO: 1008 - DNA, 1440 bp, synthetic construct
  source 1..1440: mol_type = other DNA
  misc_feature 1..1440: note = Gene encoding SEQ ID NO: 929
atgacctccgcccagattcctgaagttaatccattagatgttcttgtcgttggggcagggatttcaggtttaacgatcgcccacgaactagcgatcgctaaaaactatcgcgtcttggtggcggaggcacaggatcgcgtgggcggcgcgattactagcgcaaaaaatgacgagggctatcaatgggaggaaggtcccaatagtttccagccagcccccgaattattacgtttagccgtagaagtcggactcaaggatgaattggtgcttgcggatggcaaactaccccgctttgtatttctcaacggcaagttaaacgctttgcccatgtctccgccaacggcgatcgcctcccaaattttgacttggggtggcaaaatccgtctcgctttgggggcaatgggttttgcacgccctgcgatggcgggagaagaatccgttgatcgcttcttttcgcgcctgttaggcagacaagcggttgatcgcttggttgctcccttcatttctggagtatatgcgggcgatcccaagcggctcagtgcgaaggctgcttttgcaaaaattgccaagctggaaacctatggtggtttgcttgctggggcaatattatcaagtaaagagcgcaaagcccaaaaacttaacgatcctcgcattccgaaaacgaaggctggggagttgggttcctttcgcgagggaataaaaatgctccctgaagcgatcaccgctaaattaagggcgcagggtacagccgtcaaacaacaatggactctgcaatcgctagagaagcaaggcgaaatctatgtttccaaattcgctacccccacgggcgaagaaattgtgacctcgcgatcggtcgttctttccacccccgcctatgtcactgcaaaattattacaagattatttgcccgccgctagccaagccttaaatgagattttttatccaactgttgcctgtgtggtacttgcctaccccaaaagcgaatttcgctatgacatgaaaggctttggcaatttgattcctcggacagagggagttagaaccctaggaacaatttggtcatctagtctctttgcaggacgcgcccccgcaggttggcaactattgctcaattttatcggcggcacgcttgatcccgcactagcccatttatcagaagcagaaattattgctgccgtgcatcaagatctcaaaaaaacaattcttcgccccgatacgaaggtatctcccaaagcgatcgccgttcatgtgtgggataaggctattcctcaatacgaaatcgggcatttagagcgacttgccacggtagaagctgaattgcaaaaatcttcagggctatatatcagtgctaattttattggcggagtcgccttaggtgactgcatcaagcgtagcttgcaagaagctcataaaattgcggcttttttagaaaccatttag

SEQ ID NO: 1009 - DNA, 1437 bp, synthetic construct
  source 1..1437: mol_type = other DNA
  misc_feature 1..1437: note = Gene encoding SEQ ID NO: 930
atgaccctcacgccatcttctgaagaaaatcagccattagataccctaatcattggggcaggaatctcaggattaacgatcgctcatgagctagtgatcgctaaaaactaccgcattttggttgcggaggcacaggatcgcgtgggtggtgccataactagcgccaaaaatgacgaaggctatctatgggaagagggcccaaatagttttcaacccgcacctgagctattgcgcttagcggtacaagtgggactcaaggatgaattggttctagccgatggcaaattgccccgttttgtctttttgaatggcaagttaaatgccttgccaatgagtccaccgaccgcgattacttccaaaatcctgacttggggcggcaagattcgtctggctttgggggcgatcggctttgctcgtccagcgatggctggggaagaatctgtcgatcaattcttttcacgtatattaggcaagcaagcagttgaaagattggttgcgccgtttatatctggtgtgtatgcaggtgatcccaagcgactcagtgccaaggctgctttttcaaagattgccaaactagaaacctatggaggcttgctctcaggagcaatattatccagcaaagaacgtaaagcccaaaagctcaacgaaccgaatattcccaaaactaaagctggtgaattaggatcgtttcgacaaggcatccagatgctgccagaagcgatcgcgtcaaagttaagggagacaggtacagcagtcaagcaaaaatggactttgagatcgctagaaaaacaaggcgatatctatatttctaagttcgatacaccctcaggtgaagaaactgtgacatcgcgatcggtggttttgactacccccgcctatgtcaccgccaaacttttggaagattatttgccagccgctagccaagctctgaatgagattttctatcctactgttgcttgcgtggtgcttgcctatccaaagagcgaatttgcccatgacatgaagggctttggcaacctgattccccgcactcaaggagtgagaacgttaggcacaatctggtcatcaagtttatttgctggacgtgcccctgaaggttggcaactattactaaactttatcggcggcactctcgatcctgccctagccaagctttcagaatcggaaattattgctgctgttcatgcagatctaaagaaaacaattctccgacctgatactaaagccgaaccgaaggcgatcgcagttcatgtatgggataaggcaattccacaatacgaaatcggacatttagatcgacttgccacagtggaagcagaattacagaaatcacaaggactgtatgtaagcgcaaactttatcggaggtgtggctcttggtgattgcatcaagcggagcttgcaagaagccaataaaatcgatgcatttttaaaatga

SEQ ID NO: 1010 - DNA, 1509 bp, synthetic construct
  source 1..1509: mol_type = other DNA
  misc_feature 1..1509: note = Gene encoding SEQ ID NO: 931
atgtccaaccataatcatgctggctcaccgatcgacctgttggtagttggcgctgggatcagtggcctcaccgtggctcatgacctggccagcaattctgtcgctgaggctaatgggtcaaaccagctcaggattatcgtcaccgaggcacaaaatcgggtgggcggggcgatcgtctcgcagcgggatgaagtaggttttcaatgggaagaagggcccaatagctttcagccagccccagagctactcaaactggcggcggcggtggggctaaaggatgaattagtatttgcggatggcaagttgcccaggtttgtgttctggaatgggaagttaaatgctctgcccatgtcaccgcagctgctaaccaaatttaatttattaacgatcaagggcaagctaagggctttcctgggggcgatcggctttgtgcgaccagcggcagcgggggaagaaactgtggcgcagttttttaagcggcatctggggcaagaggtggtcgatcggctggtagtaccgttcatctctggggtttatgcaggcaatacggacaagctgagtgcggcggcggcatttggcaagattttccggttagaaaaaaactacaatggtctggtggcgggggcgatcctgtcgcggttggccaagcgcaagcaagagaaggcgcaaaccaaccagccagcaaatatttacgatcgccaggagatccccaaaaccaagccaggacagttgggatcatttaaaaatgggattgaggctctgcccagggcgatcgccgaagatttaatcgacaaaggtcatgaggtgcgattgcaatggcggttggacaaaatccagcccaactctgatgggacatatagcgccacctatgagacaccccacgggatcgaaacgatcacggcgcgggctttgctccttactacgcctgcctatgtttccagtatgctgctgcaagatattgcccctgatgcagctcaatctttgggtgagatttattacccgccagtggcctgtgtggtgttggggtatccggatgcggcgatgaaacgggatatgaatgggtttggtaatttgatcccgcgtagtcagggcatccgtacgttgggcacgatctggggatcgagtttgtttagcgatcgcgctccggctggctatcatctgctgctgaattttattggtgggtcgttggatactggcattgccgatctatctgaacctgaaatagctcaggcggtgcatagtgacctgaagcaaacgttgctgaaaccagacaccacgatcgaaccgaaggtgttggcggtgcatttgtggcaacgggcgatcccgcagtatgaggtcggtcacctcgatcgattggcgcgggttgaaagggatctggctaatcatcctgggttgtttgtgagtgctaattttattggtggcgtggcgctgggggattgtgtgaagaggagttttggtacggctgaacaaattaaggggtttttaaatctgtctactaaaaaaaaataa

SEQ ID NO: 1011 - DNA, 1440 bp, synthetic construct
  source 1..1440: mol_type = other DNA
  misc_feature 1..1440: note = Gene encoding SEQ ID NO: 932
atgtccctaacaccttcctctgcaaccaatcaacccttagatgttcttgtcgttggcgcagggatatcaggcttaacgatcgcccatgaactggcgatcgccaaaaaatatcgcgtcttggttgcggaagcacaggatcgggtgggcggtgcgatcaccagcgctaaaaatgatgaaggttatcaatgggaagagggtccaaatagttttcagcctgcgcctgagctattgcgtttagcagtacaggtgggactaaaggacgaattggtattagctgatggcaaattgccccgttttgtctttctcaatggcaagttaaacgctttacccatgagtccaccgacagcgatcgcctccaaaattttgacttggggaggcaaaattcgtctggctttaggtgcgatcggctttgcgcgtcccgcaatggctggcgaagaatccgttgatcaattcttttcgcgccttctaggtaaacaagcggttgaaagattagttgcaccgtttatctcaggtgtatacgcaggtgatcctaaacgactcagtgccaaggcagcctttgccaaaatctttcggttagaaaatagctataacggtttgctcgcaggcgcgattctttcggcaaaggaacgtaaagcccaaaagctgagtgatcccaatattcctaaagttaaagctggtgaattgggttcatttcggcaagggattaagatgttgcctgaggcgatcgccacgaaattgcgagatcaaggtacagccgtcaagcagcaatggactttgcgatcgctagaaaagcaagacgaaatctatatttctaagtttgatacgcctacgggtgaagaaacggtgcgatcgcgatcggtagtactcagtacccccgcctatgtcactgctaagctattgcaagactatctaccagcagctagccaagccttaaacgagattttttatccgactgtagcctgtgtagtgatggcatatcctaagagcgaatttgcctatgacatgaaaggatttggcaatctcattccccgcactcaaggcgtgagaactctaggcacaatctggtcatccagtctatttgcaggacgcgcccctgaaggttggcaactgttattaaactttatcggcggcacgctcgatcctgctttagctaagctatcagaacctgaaatcattgctgccgttcatcaagatctcaagaaaaccatcctgcgtcctgatacaaaagccgaaccgaaggcgatcgcagtccatgtttgggataaagccattcctcaatacgagattggacatttagaccgccttgcgacggtagaaaaagaattacaaaaatctcaaggcttgtatatcagtgccaactttattggcggtgtggctttaggtgattgcatcaagcggagtttgcaagaagctactaaaattgatgcattcttaaaataa

SEQ ID NO: 1012 - DNA, 1452 bp, synthetic construct
  source 1..1452: mol_type = other DNA
  misc_feature 1..1452: note = Gene encoding SEQ ID NO: 933
atgaccacctctcaagaaactaaagctagtcaaccgttagatgttcttgtcgttggggcaggaatatcgggtttaacgatcgcccacgaactggcgatcgctaagcacagacatgtcttagttgctgaagcacaggatcgagtgggtggtgcgattaccacggctagcaataacgagggttatctttgggaagaagggcccaacagttttcaacctgcacccgaactattgcgcctagcggtagaggttgggcttaaagatgaattggtactggcagatggcaaattaccaagattcgtgtttctcaatggcaagttaaatgctctaccaatgagtccaccgacggcgatcgcctccaagatcttgagttggggaggcaaaatccgtctagctttaggtgctcttggctttgcgcgtccagcgatggctggcgaagaatctgtcgatcgattcttttcgcgtttattggggaaacaggctgttgaaagattggttgccccctttatctctggtgtctatgcaggcgatccgaagcggctcagtgcgaaggcagccttttccaaaattgccaaactcgaaacctatggaggcttgctcgcaggagcaatattgtcgagcaaagagcggaaagcccaaaagctcaatgaccctaatattcccaaaactaaggctggtgaacttggctcttttcgccaagggattaaaatgctacccgaagcgatcgctgctaagttaagagcgcaagggacaccagttaagcagcaatggacgttgcgatcgctccagaagcaagatgaaatttatatcgctaagttcgatacgccaacgggtgaagaggtcgtcacatcgaagtctgtggttctcagtacaccagcctatgtttccgccaaactactgcaagattatttgcctgctgccagtcaagcgttgagcgagattttttatcccactgttgcttgcgtggtgcttgcttatcctaagagtgcatttgcctatgacatgaaaggctttggcaacttgattcctcgcactcaaggcgtgagaactctcggcacaatttggtcatcaagtctatttgctggacgcgctcccgatggctggcaactgttacttaactttatcggcggtacgctcgatcctgctctagctcaactttcggaatctgaaatcattcaagccgtacatcaagatctcaagaaaacaattctccgtcctgatacgcaagtggaaccaaagacgatcgccgttcatgtatgggataaggcaattccacagtacgagatcggtcatttacaacgccttgcaaccatcaaagcagaattacaaaaatctcaaggattgtacatcagcgctaattttatcggcggtgtagctctaggcgattgcataaagcgtagtctgcaagaatcgatcgaaattgatgagtttctatcgagaacaaactctctttaa

SEQ ID NO: 1013 - DNA, 1446 bp, synthetic construct
  source 1..1446: mol_type = other DNA
  misc_feature 1..1446: note = Gene encoding SEQ ID NO: 934
atgaaccaattagccgatcgcccatcaggtgagcaaactttggatgtgcttgtggtgggagcaggaatttcaggcttgacgatcgcctatgatttggcaattaatcagcatcggcaggttttagtcgctgaagcgcaagatcgcgttggtggggcaatcgtctctaaacaaaatgacgaaggctatctttgggaagaaggacctaatagctttcagcccacacccgaactgctgcgcctagcagtcaatgtgggacttgaggatcaattggtgctagccaatggcaagttaccgcgctttgtatttttaaagggcaaactaaacgctttgcctatgagtccccccgccgcgatcgccacaccattattggattggggtagcaagattcgcttggcactaggggcgatcggttttgcccgtcccgccatggctggcgaagagtcggtggatcagttctttagcagactgttgggcaagcaagcggtggcgcgtttggtagcaccgtttatttcaggagtatatgcaggtgatcccaagcgactaagtgctagggctgcttttgccaaaatatttcgcctcgaaaataattatggcggcttagtggcaggtgcaattttatcaggtaaagatcgccaagctcaaaaggctaaaaatgccgatctgcctaaggtcaaggcaggtgaactagggtcatttaaacaggggattaagatgttgccagaggcgatcgccactaagctgcgatcgcaaggcacagcagttaaacagcaatggactttgcgatcgctagatcggcaaggtgatcattacatcgccaagtttgacacccccacgggcgaagaaacggtcatgtcccgtgctgtagtactggctacccccgcctatgtgacagccaacttattaaaagactatttgccatcggcaagccaagccctccgcaaaatcttttatccaaccgttgcctgtgtggtgctggcttaccctaaaaccgaatttgcctatgatatgcagggctttggcaacctcatcccgcgtacggaaggagtccgcaccctcggtacgatctggtcatcgagtttatttgcaggacgcgccccccaaggttggcaactactgctcaacttcatcggcggcaccttagatccagccctagcacagctttctgaggcagaaattatccaagctgtgcatcaggatttgaaaaaaactatccttcgtcctgataccaaagcagaacccaaggcgatcgctgtgcatcgatgggacaaggcgattccgcagtatgaaattgggcatttacaacttctcgccaccgtggaagcggagttacaaaagtctcaaggtttatacatcagcgccaattttattggtggagttgccctcggtgactgcatcaagcgcagcttgcaggaagctattaaaattgagcaatttttagccaaataa

SEQ ID NO: 1014 - DNA, 1467 bp, synthetic construct
  source 1..1467: mol_type = other DNA
  misc_feature 1..1467: note = Gene encoding SEQ ID NO: 935
atgccctcaccccaatctgctacgaaccaatcagatgatcgcccatcaggtgggcaacctatagatgtgctggtagtgggcgcaggagtttcaggtctgacgatcgcccatgatttggcaattaattaccagcgccaagttttggtggcggaggcgcaagatcgcgtgggcggagcgattatctcaagacaaaataatgaaggttatctctgggaagaaggtcccaatagctttcagcctgctcccgaacttttgcgtctagcggtcaatgtcggacttgaggatcaattagtgctagccaatggcaagttgccgcgctttgtatttttgaagggcaaattaaacgccatccccatgagtccccccgccgcgatcgccacaccattgttggattggggtagcaaaattcgcttggcgctgggggcgatcggctttgcccgtcccgcgatggcgggtgaggagtcggtggatcaattttttagcaggctattgggtaagcaagccgtagcgcatctagttgcgccatttatctcaggcgtatatgcaggtgatccgaagcgattgagtgctagggctgcctttgccaaaatatttcgccttgaaaataactatggcggtctagtggcaggcgcaattttatcaggtaaggatcgccaagctcagaaagccaaaaatacggatctgcctcaggttaaggcaggtgagctagggtcatttaagcaaggaatcaagatgttgccagaggcgatcgctacgaagctgcgatcgcaaggcacgcccgtcaaacaacaatggactctgcgatcgctaaatcgacaagacgatatttacattgccaaatttgacacgcccactggcgaagaaatagttatgtcccgcgccatggtaatggctacacctgcctatgtgactgccgacttattaaaagactatttaccatcggcaagccaagccctcagcaaaatcttttatccaaccgttgcctgtgtggtgctggcttaccctaaaactgaatttgcctatgatatgcagggctttggtaatttgatcccgcgtacggaaggagtccgcacccttggtactatctggtcatcaagtttatttgcaggacgcgctccccaaggttggcaactactactcaacttcatcggtggcacattagatccagctctagccaagttatccgactcagagatcatccaagctgtgcatcaggatttaaaaaaaactatccttcgtcctgatactaaagcggaacccaaggcgatcgcagtgcatcgatgggataaggcaattccgcagtatgaaatcggacatttacaactcctcgccactgtggaagctgaattgaaaaagtctcaaggtctatacattagcgccaattttatcggcggcgttgctctcggtgactgcatcaagcgcagcttgcaagaagctattaaaattgagcaatttttagccaagtaa

SEQ ID NO: 1015 - DNA, 1692 bp, synthetic construct
  source 1..1692: mol_type = other DNA
  misc_feature 1..1692: note = Gene encoding SEQ ID NO: 936
atgatgttgacccagactcctgggaccgccacggcttctagccggcggtcgcagatccgctcggctgcgcacgtctccgccaaggtcgcgcctcggcccacgccattctcggtcgcgagccccgcgaccgctgcgagccccgcgaccgcggcggcccgccgcacactccaccgcactgctgcggcggccactggtgctcccacggcgtccggagccggcgtcgccaagacgctcgacaatgtgtatgacgtgatcgtggtcggtggaggtctctcgggcctggtgaccggccaggccctggcggctcagcacaaaattcagaacttccttgttacggaggctcgcgagcgcgtcggcggcaacattacgtccatgtcgggcgatggctacgtgtgggaggagggcccgaacagcttccagcccaacgatagcatgctgcagattgcggtggactctggctgcgagaaggaccttgtgttcggtgaccccacggctccccgcttcgtgtggtgggagggcaagctgcgccccgtgccctcgggcctggacgccttcaccttcgacctcatgtccatccccggcaagatccgcgccgggctgggcgccatcggcctcatcaacggagccatgccctccttcgaggagagtgtggagcagttcatccgccgcaacctgggcgatgaggtgttcttccgcctgatcgagcccttctgctccggcgtgtacgcgggcgacccctccaagctgtccatgaaggcggccttcaacaggatctggattctggagaagaacggcggcagcctggtgggaggtgccatcaagctgttccaggaacgccagtccaacccggccccgccgcgggacccgcgcctgccgcccaagcccaagggccagacggtgggctcgttccgcaagggcctgaagatgctgccggacgccattgagcgcaacatccccgacaagatccgcgtgaactggaagctggtgtctctgggccgcgaggcggacgggcggtacgggctggtgtacgacacgcccgagggccgtgtcaaggtgtttgcccgcgccgtggctctgaccgcgcccagctacgtggtggcggacctggtcaaggagcaggcgcccgccgccgccgaggccctgggctccttcgactacccgccggtgggcgccgtgacgctgtcgtacccgctgagcgccgtgcgggaggagcgcaaggcctcggacgggtccgtgccgggcttcggtcagctgcacccgcgcacgcagggcatcaccactctgggcaccatctacagctccagcctgttccccggccgcgcgcccgagggccacatgctgctgctcaactacatcggcggcaccaccaaccgcggcatcgtcaaccagaccaccgagcagctggtggagcaggtggacaaggacctgcgcaacatggtcatcaagcccgacgcgcccaagccccgtgtggtgggcgtgcgcgtgtggccgcgcgccatcccgcagttcaacctgggccacctggagcagctggacaaggcgcgcaaggcgctggacgcggcggggctgcagggcgtgcacctggggggcaactacgtcagcggtgtggccctgggcaaggtggtggagcacggctacgagtccgcagccaacctggccaagagcgtgtccaaggccgcagtcaaggcctaa

SEQ ID NO: 1016 - DNA, 1698 bp, synthetic construct
  source 1..1698: mol_type = other DNA
  misc_feature 1..1698: note = Gene encoding SEQ ID NO: 937
atgctgactagccatgccactaacatctacgcgaactcaaaggccaggcttcagatccgcgagatcgctcggccgacggtgaccggtgtctcgaggtcaggcgttcttcaggatgtcgcctctccgctcccacggcagattccgaggccagctcaacgtgctgcgcgtcctacttctgctacggccacttcaagtggggtacccacggcggacagtgcccgtggcacgaagatcgttgacaatgtgtatgacgtgattgtggttggcggtggcctctccgggctcgttacgggtcaagccctctcggcgcaacatggtgttaataacttcctcgttaccgaggctcgcgagcgcgtcggcggcaacattacgtccatgtcgggcgatggctacgtgtgggaggaaggcccaaacagcttccagccaaatgatagtatgttacaagtagctgtggatgccggggtggagaaggacctggtgttgggagaccccaaggcaccccgatttgtgtactggcagaacaagctccgtcccgtccccagcggccctgatgcgctcacctttgacctcatgtcccttccggggaagatccgagctggtctcggagccattggcctgatcaacggagccatgcctaactttgaggagagcgtggagcagttcatccgtcggaacctgggtgacgaggtgttcgagcgcctcattgagccgttctgctcgggggtgtacgcgggagatccatccaagctatccatgaaggcagcgtttaacaggatctggattttggagaaggacggcagcagtctggtggggggtgcgttgaagctgtttcaggagcgccgcaagaacccgccgccacctcgcgatccccgcctgccgcctaaacccaagggccaaacggtgggttctttccgtctcggtctcaagatgttgcccgaggcgattgagcggcgtatcaaggaccaagtcagggtcaactggaagctggtgtcgttgacgcgcgacggcgatcgctacagcctggtgtacgacacgccggagggccgagtgcaatgctacagccgtgcggtggcgctgacggcaccgtcgtatgttgtggcggatcttatcaaggctgaggtgccagccgctgcggaggctctgtcctcgttcgactaccccccggtgggggccgtcactctgagctaccccctgtcagccatacgggatgatcggaaggacgcgcagggcaacgtgccgggtttcggacagctccacccccgctcgcagggcgtgacgactctgggcaccatctacagctcctccctgttcccgggtcgggctcccccggggcacatgctgctgctcaactacatcggaggggccacgaaccgagggatagtcaaccagacgcaagagcagcttgtggcgcaggtggacaaggacttgcggttgatggtgctcaagcccgacgcgccggctccacgtgtggtgggcgtgcgggtttggccccgtgccattccccagttcaacatcgggcacttggagctgctggataaggcccggggggcgctggaggccaagggctggaatggcgtcttccttggcgggaactacgtctcgggggttgccttgggcaaggtggtggagtacgggtacgagagcgcggccaaacttgcaaagcacctcacagccgctcagaagcaggtggcggtgtaa

SEQ ID NO: 1017 - DNA, 1482 bp, synthetic construct
  source 1..1482: mol_type = other DNA
  misc_feature 1..1482: note = Gene encoding SEQ ID NO: 938
atggccgtcgcggagggcgccacacccgcgccggccgcggcgtccgccaccccgtcggaagtcgacgcgctagtaatcggctcgggcatctccggctcgtcgctggcctttacgctgtcgcaggcctcgcccgccacgtcgctgctgctcacggaggcgcgccccgtcgtgggcggcaacgtcatctcgcgcaacgagcgcggctacacgtgggaggagggccccaacaccttccagccggccccgcacatcatccgcatggccgtcgacctcggcctcagggacgacatcgtcctggctgaccacaccctgccccgcttcgtgtactgggatcagcgcctgttcgccctgccgctctcgccgaacgacatccccaccttccgcctgctctcgctgcccggcgccatccgcgccggcctgggcgccgcgggctttgtcatgcccccgcccaaggggagggaggagagcatcaaggactttatcacccgccacttgggcgccgaggtcttccagaagatgatcgacccgttcgtgtccggcgtgtacgcgggcgacccgagcaagctcagcatgtcggccgccttcaagaagatctacgccctgcaggagctaggcatgacgcagggcattgtggagggcgccatcattcgcatccagcagaagaagaaggaggccccgccgccggaccccgagctgcccacgtggaagggcggcgcgctgggctcgttccgcaaggggctgggcatgctgccgcaggccgtggcggagcggctgggcgaccgcgtcaagttgtcgtggaagctggtgtcgctgggcaaggagagcgacgggcggtatcgggcgacgtacgagacgcccgaggggacgaagacggtgattgcgcggagcgtggcgatcacggcgccggcgaacgcgacggctgggatcctgggggaccttgcgccgggcatcaaggcgatcgaggagatcaactacccgacggtgtggtcgatcacgctggcgtacccgaagaacgagttccgcgagccgctgagcgggtttggaaacctgatcccgcgcagcatggggatccggacgctcgggacgatctggtcgagctgcctgttcccggggcgcgcgccggagggcatggagctgctgctgtcgtacatcggcggcgcgcaggacgccgcgattaaggagctgacggaggacgaggtggtggccacggtggacgcggatatcaagaagattttgatgaaggacgggagcgaggttaagcccgtggtggtcggggcgcggaagtgggatcgcgcgattccgcagtataatatcgggtactgggatatcatgggcaaggctgaggaggcggtcaaggagcaccccggcatcttcttgggcggcaactatacgagcggcgtcgcgttcggggattgcgtgcaatggggcattgatacggcacccaaggttgcagagtatgtcgccgcgcaggcggcggtctaa

SEQ ID NO: 1018 - DNA, 1713 bp, synthetic construct
  source 1..1713: mol_type = other DNA
  misc_feature 1..1713: note = Gene encoding SEQ ID NO: 939
atgagcagtggattcttgtgtttttgtccaaacgcggttatcaaagcagctcagtatgtgagacctaaaaacactttttcgtgtaagcactatacctgcaaaaatagaaatagttggttttacggcaatgagttgtatataaagagacgtaaagtggtcgaacagcagagaacaactagccacgtttctaagttgccttttcgtcaaacatggaaagctgtttcagctcagcacacggaagatggcgaatgtagtgtattgattattggttctggcgtcacaggaagtactgctgcttttcaattggccgaaagtggcattgatgtcttagtagctgagaaaaatgaacaagtcggaggaaatatcatttctagaaaggagcaaggtttcatttgggaagaaggtccaaatacattccaacctactccagatattcttgttatgatcgaaaagttaggtttggtagacaaactggtcttagctgatgcaaagctgccacgatatgtgttctaccaggataaacttcataagattccttcaagtccttttgaagcctgccaattttctctgttgtcgacaagaggaaaattgcgtgcctttctaggagctattggctttgctccaatgaatctcaaaaagaaagaggaaaccgtaagagattttgtaacgagacatttgggggaagaggtatatgaacggcttgtggatccttttattagtggagtatatgctggtgatccttccaagctgagtatgaaagcagcattcaaacgagttcaagccttggaagaaaaaggtgttacccaaagccttattgaaggtgctattattcgaatgtttgaaacaaagaacagtaaaggaaagaaagaaacaaaaggttctctcaaggttccaagaggctctcttggttcattcaaagatggcttacaaatgtacccccaatcagtacagtcgaagctttcgaacaaagtgaagactggatggaagttgataagactggagaagagcggaaatggaagcagtcatcagtcatgtgaggattactttgcagtgtttcaaatacccaatggaatcaccaaagtaatacgtacgaaggcattgatatttactagtcctgcttatatcactgcatctcttttgagacctttcattcccaatgcatcagatctgttggagcaaatctattatccttgtgtagtatcagtatccttagcgtatccctcttcatcttttcgatttcctttatctggttttggtcatttgattccaagaagtacaaaaattcgtactttgggtaccatttggtcgagtagtctatttccatatcgagtacctgaaggttatcatcttttatcctcttacattggaggtgctcaggatacggatattgcttcgctatctgaagaccaagttgtgaaacaagttgattctgatataaggaaaatacttttaaggcaagatgcagctcttccaaaggttttgggagtacgtcattggaacaaggccattccgcaatatgaactaggtcatctctctcgaatggaaactattcaaagtcaagtcagtgaaactcttccaggtgtgtttttgggtggtaattatgtcagcggaatttcttttggagattgtgtgtcatttggtatgcaacttgctgatcaagcatcttactatatcaaagaaaatacagaattgctttcttcgacagtcgtttga

SEQ ID NO: 1019 - DNA, 1449 bp, synthetic construct
  source 1..1449: mol_type = other DNA
  misc_feature 1..1449: note = Gene encoding SEQ ID NO: 940
atgacttctgctcaacccaccgaagttaatcaacccttagatgttcttgtcgttggtgcaggaatttctggcttagcgatcgcccatgaactagcgatcgccaaaaattaccgtgttttagtagcagaagctcaggatcgcgtgggtggtgcaattaccagtaatcgcaatgatgaaggctatctctgggaagagggccctaatagctttcaaccagcaccagagttattacgtctcgccgtacaggtcggtctcaaggatgaattggtacttgccgatgggaaattaccgcgatttgtatttctcaatggcaagttaaatgctttgccgatgagtccacctacagcgatcgcctccaaaatcttgacttggggtggcaaaattcgtctagcgctaggtgcattaggttttgcacgtcctgcgatgagtggtgaagaatccgttgatcaattcttttcgcgcctactaggtaagcaagccgtggagcgcttagttgcgccttttatctctggagtctatgcaggcgatcctaaacgcctcagtgctagagccgcattttctaaaattttccgtctagaaaatggctatggtggattgcttgcaggggcgctcctgacagccaaagaacgcaaagcccaaaagctgaatgatcccaatattcccaaggtgaagtctggcgaactgggatctttccgccaaggtattaaaatgctgcccgaagcgatcgctaccaaactcagagatcaaggtacggctgtcaaacaacaatggactttgcgatcgctagaaaagcaaggcgacatctatatttctcagtttgatacgcctacgggtgcagaaactattacatcgcgatcggtagttctgaccacacctgcctatgtgagcgctaagttattgcaagactatttacccgccgctagccaagccctgagcgagattttctatccgacagttgcctgtgtcgtacttgcctatcccaaaagcgaatttgcctatgacatgaagggattcggcaatctcattcctcgcactcaaggcgtaagaaccctcggtacaatttggtcatcgagtttgtttgcaggacgcgcccctgatggttggcaactattacttaactttatcggtggcacactcgatcctgctttggcaaaactttcagaagccgagattgttcaagcggtacaccaagatctcaagaaaacaattttgcgccctgatacgaaagccgaacctaaagcgatcgcagtccatgtgtgggacaaggcaattcctcagtacgagatcggacatttagagcgtctggcgacgatagaagccgaattacaaaaatcacagggtctgtatgtcagcgcgaattttattggtggtgtttcgcttggtgattgcattaagcggggtctacaagaagctagtaaaattgatgtctttttaagtagccaaggataa

SEQ ID NO: 1020 - DNA, 1452 bp, synthetic construct
  source 1..1452: mol_type = other DNA
  misc_feature 1..1452: note = Gene encoding SEQ ID NO: 941
atgacaaacctagttgatagccttatagttggtgctggtattagcgggctaagtttagcccatagcctgaaccgtgaaaaaaacccccgctcacccctaaaagttttggtcacagaaagccagaaccgagtcgggggaaatattacgaccggacgcgcatctgattttttatgggaagaaggccctaacagttttgcccccacccctgaattactcggactagccgtagatttggggcttaaacaagaattgatttttgccgatcgcaaactaccccgttatgtctactggaaccataagttacatccagtacccatgaccccccccgccctactctcctcccaactaatcagccccagaggtaaactccgcgccgccttgggagccataggatttgtgccacccccagtaggcgctcacctctctcaacagcgaggagaagaaactattacccagtttttccatcgacatctcggttcagaagtcctagaacgtctcgtccagcccttcgtttctggggtttatgctggcgaccctcaacaattagcagtccgttccgcttttagtcgattagtagccgccgaagacgcagggggtgcgctactacctggatttgtgcgatcgcgccttaataaaaaaaccaccaaagacaccacccccgaccccaatattcccaaaactcgccccggtgaattagggtcctttcgttatggcctggaaactctgcccgaaaccttggccagtaaattaggcgatcgagttaagttaaattggaccctcgaccgtttttatcccacccctcatcaaacctatattgctgaattttccaccccagacggcccccagcaagtagaaacccgaaccctcgctttaatgacccccgcccatgttagcgctcgcctcttgcaacccctacactctcaaatcgcttccgcattaagccaaattccttatccccccgtcgcttgtgtcgtactcgcctatcctaaatcagccttaaaacaacaactcaaaggctttggtaatttaattccccgccatcaaggaatccgtaccctcggcactatttggacctccagtttattccccggtcgcgccccagaatcttggcaagtcctcagcaattatattgggggtgctacagaccctgaaattggcgaaatggatgatgatcaaattgtcgccgccgttcatcaagacctacgccaaattctgctggctgaagatgtcccccccaaagtcttggctgtccatctctggcggcgcgctatcccacaatatactctcggtcatcaagatcgcctaaattccatcaatgctggattgcgatcgcttcccggactttatctgtgtagcaactatattgatggggtttccgtcggtgactgtgtgaggcgcggccagcaatgggcatcgcaaattcagtcccaccttcatccaacagccaactaa

SEQ ID NO: 1021 - DNA, 1410 bp, synthetic construct
  source 1..1410: mol_type = other DNA
  misc_feature 1..1410: note = Gene encoding SEQ ID NO: 942
atgggcaggatgagcgtagccgcagagccgctggatgtactggtagtcggtgccggcctgagtggtctggccctggcctggcacctccagcgctctggccggagggtcctggtgtgcgaggcgactgagcgggtgggcggtgcgatcagctccgaactcatcgatggcttcacctgcgagggcggtccgaacagttttcaatcgacccggcccctgcaggagttgctggtcgaactgcagctggaggagcggctggtctttgccgaggagcggctcgcccgctttgtctggtgggaaaaccgcctgcggcccgtgccgatgagccctgcgcagttcgtgcgcgcagatctgctcagctggccgggcaaactgcgctgtctatcggaattttttgtgccgcctctttcggagccgcgcgaggagacggtagccgaattcgtgctgcgccgcttcggcgacgaagcgctcaatcgcctcatcgaaccgttcatcgccggggtgttcgcaggcgacgccgggcagttgagcgccgatgcggccctcgccccgctcgtcgaactggaacgccaggcgggcagcgtgctcagggggctgtggcagcgccgcaatcggggggtgctcacaccccagcggctgtgtacgctgcgcggcggcatcgagcagttgccacgggcaattgcccggcggttgcaatcgcagttgcgcttccaatcgcgcttagaggcgctggaaccgctggcagggggctggcaggcgattgtcctcgatgggcggggtgaggcccaggcgatcagtgcccgctcggtggcgcttgccgcccccgcttgggcgatcgctccggtgctggcgcggctcgatccgagcctgggccgcgccctggagagcatctactatccaccggtggcggcggtcagcctcggctactcaaaaagccagcttcccaacctgagcgaaggcttcggccatctcatcccgcgcggacaatcgctgcgcagcctcggggtgatctacaacagttgcctcttccggcacgccgccccgacgagctggcggctttttacctgttttttagggggtacgaccgacccgctcatcgccgatctgagcgacggtgaactggccaatctggcgcaccgcgaactgcaggcggtcctcgactttcaatcgagctatcagctgttgcgggtggcgcgctggcccagagcgattccccagtatgccctgggccatatcaccaaacaggagcgcatcgagcgctacttggcggagctgccgggattgtttctggtcggcaattattttggcggcatctctgtgggcgactgcgtgcgccaggcccgtctcaaggcagatagcgtgctgcagtttctcacaagaaccgctgccaatggccgcctcaacctggcctga

SEQ ID NO: 1022 - DNA, 1401 bp, synthetic construct
  source 1..1401: mol_type = other DNA
  misc_feature 1..1401: note = Gene encoding SEQ ID NO: 943
atgaacacggccgaggaattgctggatgtactggtggtgggcgctggcctgagcgggctggcgctcgcctggaaactcaagcgggccggctgcacgttcttggtctgtcaggcgggcgagcgggtgggcggagcgatcaccaccgcgatcgccgacggttttgtatgcgaggggggtccgaacagttttcaagaatccccacccctcatcgagctgttgacccagttgcaactcgaagatcaaatcgtcaccgccgatccgcgcctggcgcgctttgtttggtgggagaaccgcctgcgctcggtgccgctcaccccggcgcagctggtgcgctccgacttactcagttggtccggtaaagcccggctgctgtgggagttgttcgtcccggccctaggcgagccccgcgaggagacggtggccgaatttgtcctgcgccgcttcggcgaagaagtcctctcgcggctggtcgatccgctggtttcggggatgtgcgcgggcgatgtcggccagttgagcatcgaagccaccttcgagcggctggtcgatctggagcgccgccacggcggggtgctgcggggtttgtggcggactgcccgcacccgcccacccttcaagcgcctctgcacgttgcgcggcggcctggagcagttgccccaggcactcgcccagcgcctgcagccgcaaatcctgctttcccaccgcctcgaggcgcttgaacacctggccggggatcgctggcgggcggtggtggccggtccgcagggcgagccggtggcaattgcggcgcgcacggtgattctgtcgggttccgcccacgccatggcttcggtcttgcgtcccctggacgccggtctcggacgcgcccttgaaagcatttactacccaccggtcgtgagcatcagtctcgcctactccaaaagccaggtgcccaacgcgccggagggcttcgggcatttgattccccgcaaccagaccctgcgcagtctcggggtgatctggaacagcagcctctttccccataccgccccacccaactggcggctctatacctgttttgtgggcggcaccaccgatccggccacccccaacctcagcgacaccgaactggccagcctcgcccaccgcgaactgcagacggtcctcggtttccaggcgggctatcaactgctgcgcgtgacgcgctggccccaggccatcccccagtacgccctcggccatcccagcaagcaggagcgggtcgaacgggcgctgttgggactgccggggttgttcctggtcggcaattacttcggcggcatctccctgggagattgcgtgcgccattccggtgcggtcgcctcccgcgtactgcagtttttaaccacggtggccagcaacggcagcctgcgcccggcctga

SEQ ID NO: 1023 - DNA, 1617 bp, synthetic construct
  source 1..1617: mol_type = other DNA
  misc_feature 1..1617: note = Gene encoding SEQ ID NO: 944
atggtcgccgccgccgccgccgccatggccaccgccgcgtccgctggcgtgcctccactcagcgggccccgcggccccgcgcggctccgcagccgcggcgtcatcgtacgctgcgccgcggtggcgggcggcgccgccgaggcgccgacctccacgggcgcgcgggtgtccgcggactgcgtcgtggtgggcggcggcatcagcggcctctgcaccgcgcaggcgctggccacgaagcacggcgtcggcgacgtgctcgtcacggaggcccgcgcccgccccggcggcaacatcaccaccgtcgagcgccccgaggaagggtacctctgggaggaggggcccaacagcttccagccctccgaccccgtcctcaccatggccgtggacagcgggctgaaggacgacttggtgtttggggacccgaacgcgccgcggttcgtgctgtgggaggggaagctgaggcccgtgccatccaagcccgccgacctcccgttcttcgatctcatgagcatccctggcaagctcagggctggctttggggccctcggtatcagaccgccgcctccaggccgtgaggagtccgtggaagagttcgtgcgccgcaacctcggggctgaagtctttgagcgcctcattgagcctttctgctcaggtgtctatgctggtgatccttcgaagctcagtatgaaagctgcatttgggaaggtgtggcgcctggaagaggctggaggtagtatcattggtggaaccatcaagacgattcaggagaggggcaagaatcctaaaccacctagggatccccgccttccgaagccaaaggggcagacagttgcatctttcaggaagggtctcgccatgcttccaaatgccattacatccagcttgggtagtaaagtcaagctttcctggaaactcacgagcattacaaagtcagacggcaagggatatgtattggtgtatgaaacacctgaaggggttgtttcagtgcaggctaaaagtgttatcatgacgattccatcatatgttgctagtgacatcttgcgtccactttcaagtgatgctgcagatgccctttcaagattctattatccaccagttgctgctgtaactatttcatatccaaaggaagctattaggaaagaatgcttaattgatggggagcttcaaggattcgggcagttgcatccacgtagtcaaggagttgagacattaggaacaatatacagctcatcactcttcccaaatcgtgctcctgctggaagggtgttactcctaaactacataggaggcgctacaaacacaggaattgtttacaagagtgaaagtgagctggtagaagcagttgatcgtgacctcaggaaaatgctaattaaccctagagcagtggatcctttagtcctcggtgtccgagtgtggccacaagccatacctcagttcctggtaggacatcttgatcttctggaggctgcaaaatctgccctgggccgaggtggctacgatgggctgttccttggagggaactatgtagcaggagttgccctgggccgatgcgtggagggtgcctatgagagcgcctcgcaaatatctgacttcctgaccaagtatgcctacaagtga

SEQ ID NO: 1024 - DNA, 1692 bp, synthetic construct
  source 1..1692: mol_type = other DNA
  misc_feature 1..1692: note = Gene encoding SEQ ID NO: 945
atggcagcctttgtcccggccgccgcggccgccccctggaccgcccgccgcagcgcctttgccggcgcccccgcggccgccggcagccgccgccccgccatggccggcgcggcggcgccgctgcggtcgctcgtccctcgggccatccccccgccgggggcggcccggcgcgcggcgccgtcgcctcgcatggccgccggcggcgcgcccgacgaggtcgtcgacgcgcttgtcgtcggctcgggcgtgtctggctccaccctcgcctaccgcctgcactctcgcggcgtttcaatgctcctcaccgaagcgcgcgacgtggtcggcggcaacgtcatctcccgctcggccaatgggtatacgtgggaggagggccccaacaccttccagcccgcgccccacatcctgcgcctggccgtcgacgtgggcctcaaggacgacctggtttttgccgaccacacgctgccccgctttgtctactggaatggcaacctgtttgcgctgccgatggggccggcggacatccccaagttccgcctcctctccccgctcggcgccgtgcgcgcgggcctcggcgcggcgggctttgtgtggcccaactggtccggcaaggaggagtcggtcaaggaattcattacgcggcacctcggcgcggaagtgtttgccaagatgatcgacccgtttgtgtcgggcgtctacgcgggggacccgtcgtcgctggccatccgcggcgcgtttggcaagatctacgccctccaaaacttgggcatcacgcagggcattgtggagggcgccatcatccgcttgcggcagcgcaaggcagaggcgggggagccagacccagagctgcccgtcgtcaagggcggcgcgctcggctcctttcgagagggcctcgggatgctgcccaaggcggtggccgccaagctcggtgacgcggtgcggctcggctggacgctcacggagctgcgcaagctcccgggctcggcgccgggctatgaggccgtctactcaacgcccgacggcccacggacggtgcacgccaagaccgtgtcgctgacggcgcccgccggcgcggcgtcgtccatcctcggcgggatgctccccgctgccaaggccctcgacgacgtctactacccgtgcgtttggtcagtcacgctctcctacccgacggccgcgtttaagcggccgctcaagggctttggcaacctcatcccgcgctccatgggcgtccgcacgctcggcaccatctggtcctcgtcgctcttccccggccgcgcgccgcccgggcgggagctcctcctctcctacattgggggcgcgcaggacaaggggattgccgacttgtcagaggaggaggtggtggctgccgtggacggggacatcaaggcgctgctgctgtcggagggggcggccgacgaagtgccggtcgtcgtgggcgtccgcaagtggccccgcgccatcccccagtacgtgcgggggcacctcgagttggtggcgggcgtgcgggaggcggccgccgccgagtgcccggggctgtttttgggcggcaactacgcgtcgggggtggcgtttggggattgcgtcgcgtggggcgacaaggccgcggcagaggtggttgcgacgctcggggacatgcccgagacgggggcgcccatggccatgccagagacggcgacgccggcgagcgtgtga

SEQ ID NO: 1025 - DNA, 1602 bp, synthetic construct
  source 1..1602: mol_type = other DNA
  misc_feature 1..1602: note = Gene encoding SEQ ID NO: 946
atgtcgcgcgcgcaggtctcgctcgcgcccgcgcgcgtcgccgatcggcgccgcgtcgggcgcactcgcgccgcccgacgcgccgtcgccgtccgcgcgtcgacggtggaacgcgacgtcgtcatcgtcggcgcgggcgtcagtggtttgtccaccgcgttcacgctggcgaagaagacgatgccgaacgcgagcgtgatggtgaccgaagccagagatcgcgtcggtgggaacattacgagtaagagcgatggcacgtacacgtgggaggaggggccgaactcgtaccaacctggggatgcgatcctcacgctggcgtgcgacgccggcatgcgggacgacatcttattggccgatcccgcgagcaatcgatacgtgctgtgggatgggaaattgagaattttgccgcacagcatcgagagtgcggttttgggggatttcttgacgtggccggggaagattcgagccggtttgggggcgatcggaatcaggccgccggcgccgggtaaggaggagagtgtgaaggaattcgtgagcagaaatctcggcacggaggcgttcgagcgattgatcgaaccattttgctcgggggtgtacgctggggatcccgcgagcttgagctcggtcgcggcgacggggcgagtgcagcgacttgaaccgctgggggggtcgctcgtggtgggcgcgctcaaggcgcaggcggaggcggcgaaggcgaagaaggagagcgggttcaagcgcgatcctcgacttccggaagtgaagggtcaaaccgtaggttcgttccgaggtggtttgaagacatttccagagggattagcgaaacaactcggcgacgacgtcgtcaagtgcaactggaagctcgtcaatgtcaacaaggctgccgagggcgggtacacgtgcgagtacgataccccggaggggcgacgaacggttatcgccaagtgcttgttgctcaccgctccggcgtacgtcaccgctgagatcgtcaaggacatggctccggcggcttcgacggcgctcaacaagttttactaccctccggtggcgtccgtgacggtttcgtacaagaaggactcgttccgtcttgacggcacttcagcgcttcctgagggtggtctcactggtttcggtcagctccacccgcgctcgcagggcatccgcacgctcggcacgatttactcgtcctcgcttttcaaggacgacaagcgccagccggatgacgagttcatgatcttgaactacatcggtggcgcccgagacgtcgcgatcaaggacttgagcgaagatgagctcgttcagcaagtgcacgaggacgcgctcaagacgatcctcaagcccggaacgccccttcccaaggttgtcggcgtcaagctgtgggagaaggccatcccgcagttcaacctcggccatctcgacgtcttggccgaggccgagaacgcgctcgaggcggcggcgtgcggcgaaaaggatggtctctttctgggcggtaactacactgccggcgtcgctctcggtagatgcgtcgaatttggcgttgagcaagccgacgaggtcgccacgttcctcaagtcggcgaagaagctaactgccgcggtttaa

SEQ ID NO: 1026 - DNA, 1656 bp, synthetic construct
  source 1..1656: mol_type = other DNA
  misc_feature 1..1656: note = Gene encoding SEQ ID NO: 947
atgctcgccgccgttggcaccgccgctggcctcctagccgtagcggggatcacccccgcttatggtttcgtaacgccctccaccgcttggaacaccgctcgcgggagcggccatggaacggcgtcgagagcagccactaccatggcagctgatattttcaaggccggccctgtcgaaaaggtggactgtgcggtggtcggctctggcatcagcgggagcacgctggggttctacctggacaagaagggcgtggactgcgtggtgctagaggcccgggatcaagtgggcggcaacgttatatccaagaaagaagacggattcctgtgggaagagggccccaactcgttccagccgacaccctacatcatgcggaccacggtcgacctgggcctcaaggaggacctcgttctggcggaccccaccctgccccgcttcgtgttctgggagggaggcctgttcccccttccctcttccctgcagtcgatcattacggacttttggttgctttcatggcccggaaagatcagggccgggctgggtgccatcgggctggtgctgccccccccttcggactacgaggagagcgtaaaagagttcgttactaggcacctggggccagaggcgttcgaaaggctcatcgaccccttcgtgagcggggtttacgcgggtgacccgtccaagctggccatcaaggccgcccttaagaaggtcgctcggttggaagtgttgggcggtccgggcttgatcgacggtgctattctcaggcttaaggagcgtgcacggcaggagaaggagctcccggagccgctgcaatcggaggaccttcccacgtaccagggaggcagcctgggctctttccgcgaggggctgcagatgctccccaacgctgctcttaaggccatggggaaagacaagatgcggacgtcgtgggtgatgaagggcatcaagcggtcagaggacggcggctacctcctcgccttcgacacccccaaggggcccaaacgcctccaggctaaggttgccgtttgcaccgcgccggcccacaggctggcctccgtcgagggactgcgggatattgtgccggaagcggcgcgattggacgaggtgtactacccccccgtggcgagcgtaaccctggcgtaccccaagtcgtccttcaaggtcgacctcaccgggttcggcaacctcatcccgaggaagatgaagatcaggaccttgggcacgatctggtcatcgtcgctattcccagggagagccccagagggctacgccatgctgctcaactacatcgggggtgcccaagaccccgcgatcaaggacctttcggacgatgagatcgtggcggagtgcgacagggacatccgcacaatccttctcaaggacgatgcgcctcccccgaaggttctcggctgccgcttgtggaaaaccgccatcccgcagtaccagaggggccacctggccatcctggaggagctgcaagagggactcaaggccgccccggggcttcgtatggggggaaactacatcaccggagtggcctttggagactgcgtgcagtatgggtacgaagaggcggagcggatcgaggagatgctcaagagcggtgccttggacgggcagcagagcgtgtccgacaaagaagcagttgcagcgtag

SEQ ID NO: 1027 - DNA, 1422 bp, synthetic construct
  source 1..1422: mol_type = other DNA
  misc_feature 1..1422: note = Gene encoding SEQ ID NO: 948
atggaggaaaccgacgttctggtggtgggctctgggatcagtggctcgaccaccgcgttttatctgaacaaagctggagtcaagtgtctgctgacagaggccaaacccgtggtgggagggaacgtgatcagtaaatcggagtccggcttcttgtgggaggagggcccgaattccttccaacccacttatccgctcatgcaagcgactgtagacatgggcctggccgatgaactggtcctggcagacgcgagcttgccccgcttcgtgtattggaaggagaaactctacgccctgcctgggggcttgggtgacatccccttcttcaatctcctatccatacccggacgtatcagggcgggtctgggggctctgggcttcattcgaggcccgccgaaggataaggaggagagcgtcaaggaattcgtgacccggcatttgggggcagagaccttcgagcggatcatcgaccccttcgtctcgggcgtctacgccggggacccgagcaagctctccatgaaggcggccctgaagaaggtgaaacgcttggaggagctgggagggaggggcattctggacggggctttgcttcgcatccaggagatccaacggaccaagccgccggtggtgccggagcaccctgtgtacaagggcgggcagctgggttcattcaagcgaggcttgcagtcgatgcccctggcggcggccaaggcgctggggaaggagaaggtccggctctcccacaagctcttgagcgtggtggaagggaaagggccgaagggtggctacgaggcggtttttcagaccccccagggacggaaacggatcaaatgccaggccctagccatcaccgcccccgcccacgttgtgcacaagctcctgcgtcctttggtcccggaggcggcccgtcttgccgacgtgtactatcccccggtcgcctccgtcaccttggcctacccgaaaaccgcctttcgggagccgttgcggggtttcggaaatttgattccccggagcatgaagatccgaacgctggggaccatctggtcgtcctccctcttcccgggcggcccccccgactacaacatgctgctttcctacatcggaggggcccaagatccgggtatcgcggagctgagcagccagcagatcgtcaaggaggtagacagggatatcaagaaggtcttgctcaagcccgacgccccggcgcccaagatcctgggcgtgcggctgtggcccaccgccatcccgcagtacaacaagggccacctggacatcctcgcgagcgtggaggcaggggtcaagaaacatccgggtctctttttgggggggaattaccgaacaggcgtggcgtttggggactgcgtgacctacgggatggaggaagcgggcaggattcagagctacttggctgctaaggctccgtaa

SEQ ID NO: 1028 - DNA, 1419 bp, synthetic construct
  source 1..1419: mol_type = other DNA
  misc_feature 1..1419: note = Gene encoding SEQ ID NO: 949
atgaaaaagatgcgcgaggcgacggtgctcgtcacggaggcgcgcgaacgcgtcggagggaacgtcacgagtcgatcggatgggacgtacacgtgggaggagggaccgaactcgtatcagccgggggatgcgatcttgacgctggcgtgcgacgcggggatgcgcgacgacatcttgctggcggatccggcgagcaatcggtacgtgctgtgggacgggaagctgcggattttaccgcacagcattgagagcgcggtgttgggggattttttgacgtggccggggaagattcgggcgggattgggggcgatcggaatcaggccgccggcgccgggcaaggaggagagcgtgaaggagttcgtgagcagaaacttggggacggaggcgttcgaacgtctgatcgaaccgttttgctcgggcgtgtacgcgggtgatcccgcggcgctgtcgtccgtggcggcgacggggcgcgtgcaacgactcgaaccgctcggcgggtcgctcgtcgccggcgccatcatggcgcaaaaggaggcggcgcagaacaagaaaccgcgcgatccgcgccttcccgaggtcaagggccaaaccgtcggctcgttccgcggtggtttgaagacgttcccggagggtttggccaagcagctcggcgacgacgtcgtcaagtgcaactggaagctcgtcggcgtctcgaaatccgccgagggcgggtacgagtgcgcgtacgacaccccagaagggccgcaaacggtgagaacgaagtgtttgttgctcaccgcgccggcttacgtcgcggccgagatggttaaggacatggctcccgcggcggcgacggcgctgaacaagttttactacccacccgtcgcgtcggtgacgatttcctacaagaaggattcgttccgcctcgacggcaccagcgcgttacccgaaggcggcctcactggcttcggtcagctccacccgcgctcgcaaggcattcgcacgctcggcacgatttatagctcgagcctgttcaaggacgacaagcgtcaaccggacgacgagttcatgattttgaactacatcggcggcgcgcgcgacgtcgcgattaaagacttgagcgaggaggagctcgtgaagcaagtccacgaggacgccttgaagacaatcttgaagcccggtacgccgcttcccaaggttgtcggcgtcaaggtttgggaaaaggccatcccgcaattcaacctcggccacttggacgtcctcgccgaagccgagaacgcgttaaccgccgccgactgcggcgaaaaagacggcttgttcctcggcggcaactacaccgcgggcgtcgcgttgggtcgatgcgtcgagttcggcatcgagcaagcggacgaagtcgtggcgtacttaaacgccgcatccaagaaggccgtcgcggtgtga

SEQ ID NO: 1029 - DNA, 1713 bp, synthetic construct
  source 1..1713: mol_type = other DNA
  misc_feature 1..1713: note = Gene encoding SEQ ID NO: 950
atggtgacgatggcggcggtgaggacgaaggcttgggtgaccagcccgtccatgctgagctctcctgctctcctcaggatgccttcctgctcatggaccggcaagtcctctgtaagaggcgctagagacagctcggtccagttccggggaaggtcggctcggttcggagctggggttcgagggatgcaatctgcgggaggatggggagcggggagcatggagaagtacgacacacttgttattgggagcggcgtgagcggctcttctcttgggttctccctgttccagaagggcgtcaacgtccttgttactgaagcaagggacgtggtgggaggaaacgtgatcaccagagagcaggacgggtttctttgggaggaaggacccaacaccttccagcccactcgccagatcatgcgccttgctgtcgatcttggcttgaaggacgagcttgtgtttgctgaccacacccttcctagatgtgtgtactgggagaaagagctcttccccctcccctccaagcccgaggatgcgccgttcttccgcctgctctccatccccgagaagatccgagctggaatcggagcgatcggcctgcatgcgccgaagccagactacgaggagtcagtgaaggacttcatcgagcgacaccttggcgaggcagtgttcaagaagatgatcgaccccttcgtgtcgggagtgtacgcgggtgaccccaccaagctctccatggcctcggccttcaagaagatctacgcgctcgaggacctcggcatgaccccaagcttgatcgagggaggcatcatccgccaggcggagagggccaaggaggccagggaaaactatgaccctgagctgccaacctacaagggaggggctctcggctccttcaggaagggtcttgtcagtctccccaaggctgcccaggagaagctcggagatcgcctgaggaccagctggaaggttgagtccatctccaagggagaggatgggggatacgtcaccaagttttcgaccccccagggttccaaggaggtttggtccaagactgtggccgtgactgctcctgctcatgctaccgtgggcatgctctccgagcttgtgcctgagtgcaaggcccttgaagagatccactacccgtgcgtctactccgtcactctcgcctaccccaaggagtgcctcaaggacgaggttcgcaaagagagaccgggcctcggcaagaggctcttcgggttcggaaacctcatcccccgcagcatgggtatccgtaccttgggaacgatctggtcctcctcgctcttcccctaccgtgctcccgagggctacgagatgatgttgagctacatcggaggagcccaggaccctctccgctacaaccctcccatcgccgagctctcggaggaagaggtggcaaagattgtccatggtgacgtcagcaagatcctcctcaaggaaggagctcctgagccaaaggtcctgggagtgcgcaagtggcccaaggccatcccccagtacaacaagggatactcggagattatgggcaaggtcaacagcggtctcagcaagtgccctgggctgtaccttggaggcaactacgtctctggcgttgccttcggcgactgcgttcagtggggagtcgacactgcacccaaggtcaaggagttcctcgactccgtcccttcctccgagaaggcggccaacgctgcgctggtgtaa

SEQ ID NO: 1030 - DNA, 1728 bp, synthetic construct
  source 1..1728: mol_type = other DNA
  misc_feature 1..1728: note = Gene encoding SEQ ID NO: 951
atgctcaggtggtccggatctcaacaggtaaccgaccggaaccgagccgaacagcatggcctggtcgtggcgttcgcttttcctgctcgagcaccgcgccacagcgaagcaacacacgagcgctggactgggctggcgcagcgcgaacgcggcttgtgtgtaccgttgaaagcgaccaagtggaaacgagacttgtggcactcgcgaaagcttcaaatgcaggagcctgcacagcggaacagagagcaggtgcaagcgctagtagtaggctctggagtgactggctcttcgttcgcgttcctgctgcagcacgctggaataagcgatgtgatttgcaccgaggcacgaggtgaagttggtggaaaccttatttcgcgttccaaagacggctacctttgggaagaagggcccaacaccttccaaccaacaccggtgattctgaaactcgcgcgagacgcgggtctcgagtccgagcttgtcttcgccgacgccaaactccctcgatacgtatactgggagggggttttgcacgcgctcccgagttcgcctgcagacctgatcaccggccgtttccgcctgttatcgaatgcggggaaggctcgggcagcgctcggagcgctcgggttcgtaggcgcacccaaacgcgtcgcacggcaagctggacccgagcccagcgaggatgctgacctagcagacgagtctgtagaggaattcgtgactcgccatctaggccgcgaagttttcctgaagattatagaccccttcgtgagcggtgtgtatgcaggcgatcccagcaaactctccatggctgcagctttcaagcgcgtgtacgcactcgagcagcttggcggaacacgcgggattctcgaaggggcgctcatccgtctgcaacaacgtcgacgggaacgtcaacgctgggcggcagagaatctccccaaggtgaaagcgggtgcactgggctccttccgcgagggcctgcagcagttgccgctcacagtggcgactcggctgggccctgagcgaatgcgaactcggtatgcactgcgccaaattgaatacaatggagcaaaacgtggaaaacgtcgctatactgcccgcttcgaaaccccagatggcgaacgagttatcgaaacagatgccctcattcttacgatccccgcacatgcggcgtcaccgctcttgcaaggtctgggtgtctctgggagtgagctgctccaggaaatcgactttccgccggtatactcggtaactttggcatacccaaagtttgcagcgcggtttcccctaaacggtttcgggaacctgataccgcgctctgccggtattcgcaccctcgggatggtctggtcgtcgagtttgtttccggaacgagcgcctcccgatatgaatatggtgctctcatacatcggcggtgcgcgtgatcctggtatccgcgaatgcaccccggatgaagtcgctgccctcgtagacgcggacatgcgtcgcgtcctcctacgtgccgatgcaccttcgccgcaagttcttggtgtgagactttggccgcgggcgattccacaatacaaccggggtcacttgcggcgcttggaagcctgcaaccagggtctacaaggctttcctggtctctttttaggcggaaactatctgagtggcgtttccttcggtgactgcgtacagtgggcgtacgataatgtgcctcgagtgctgacgtttctgcaggagacggcttga

SEQ ID NO: 1031 - DNA, 1680 bp, synthetic construct
  source 1..1680: mol_type = other DNA
  misc_feature 1..1680: note = Gene encoding SEQ ID NO: 952
atgacgatgacgacggggatatcctcgattggaaccaagaagaacagcattaaccgcgcgaaggtgtcgtcgacgagaagaacacgaagagtccgagctgctctttccagcagcggcagcaaagggagcaactttgtggtgcgcgcgtcttcgtcttcgtcttctccttctgacgacgagaacaactctttgggtattaaagatacgatcatcgtcggtggtggtgtctctgggttgtccacggcgtttacgatgaaatcgaagaacgcatcgtgcgatatcatggtcacggaaatccgagaccgcgtcggagggaacgtgacctcgaagaatgacggtcaatacatatgggaggaaggaccgaactcgtaccaaccgggagacgcggtgttgaagttagcgtgcgacgccgggatgaaggaggatatcgttctcgcgaacccggattcggataggtacgtgttgtgggatggggagttgagagcgttgccaaaggatataccgaccgcagtgctcggggattttttgacctggcccgggaagattcgagctggtttaggggcggtgggtattcgcatgccgaaagaggaaggtaaggaggaaacggtgaaggagtttgtatctagaaatttaggcgaagaggcgtttcagagattaattgaaccgttttgctcgggcgtgtacgccggtgatccggcgatgttgagcgcggaagccgcgacgggtagagtttcggtattagagaataaaggtccgtggccgggtttgtttccgggcgcgttgaaagcgcaatacgaaggcgcgaagaagaagaaggaaaatccgagagatccgagattgccggtgattgagggtcaaacggttgggagttttaaaggcggtttgcaaacgttaccggaaggattggcgaagcagttaggagagggcatcgtgaagttgcagtggaagctgatcaaaacggaaaaaaccgaggacggtctgttctctttgacgtacgaaactccagaaggggagaagaaagtgaaggcgaaatccgtcgtgtttacgcaaccggcgtacgtggtcgcggatacggtgcgaagtatcgcgccagaagctgcgaaatcgttcgagaagttctactatccacctgttgcgtctgtcaccgtcgcatacaaacgcgacgcgtttaaattagacggccgttcagccttgcctgaaggcggcttgaccggtttcggtcaactccatccgcgaacgcaaaaagtgcgcacgctaggcaccatctactcctcctacttatgggccgacgacggacgatgccctaaagacgaattcatgatcctcaactacatcggcggcgcccgagacgtcgaaattcaaaaactcaatgaagacgaactcgtccaagccgtccacgccgacgctttaaaaaccatcttaaaaccagacacgccgttgccgaaaaaagttggcgttcgcatgtggtccaaagctatcccgcagtttaacctcggtcactggaaactcttagacgaagctaaagaacttttgaaaaaagaaaagtgcagcgaagaggacggtttatttttaggcggaaactacgtcgccggcgtcgcgtttggccggtgcgtcgaatacggcgtcgatcaagcctcggacgtgttgaactttttagataagcagagacgaaccgtataa

SEQ ID NO: 1032 - DNA, 1416 bp, synthetic construct
  source 1..1416: mol_type = other DNA
  misc_feature 1..1416: note = Gene encoding SEQ ID NO: 953
atgcatcacatgccaagaacaactggaatgaatgttgcagtagttggaggtgggatttctggtttggcagttgcacatcatttgagatctaggggtactgatgcagtacttctcgagtcatctgctagacttggaggtgcagttggaactcatgcacttgctggatacctagtagaacaaggtcctaatagttttcttgatcgtgaaccagcaactcgtgctctagcagcagctcttaatcttgaaggacgaattcgcgctgctgatcctgctgcaaagcgtcgatatgtatacactcgtggtagactccgatctgtaccagcttcacctccagcatttcttgcatcagatattcttcctctaggtgctcgattgcgtgttgctggagagctcttttcacgtagagcacctgagggtgttgatgaatctctagctgcatttggccgacgtcatctaggacatagggctacgcaggtacttctcgatgcagttcagactggtatctacgctggagatgtggaacaattgagtgtcgctgcaacttttcctatgctggttaagatggaacgtgaacatcgaagtcttattctcggtgcaatccgcgcacaaaaggctcaacgtcaggcagcgctcccagctggaacagcaccgaaattgtccggagcacttagcacgtttgatggtggattgcaagtgctcatagatgcgcttgcagcttcattgggtgatgcagctcatgtaggagcacgcgttgaaggactagcacgagaggatggcggatggagacttattatcgaagagcatggtcgtcgcgcagagctctctgttgcacaagtggtattggcagctccagcgcatgctactgctaaattgcttcgtccactcgatgatgcgctagcggcactcgtagcaggtattgcttatgctcctatcgcagttgttcatctaggttttgatgcaggaacacttccggctcctgatggttttggattcctggtgcctgcagaagagcaacgtcgaatgcttggtgcaattcatgcttctactacttttccatttcgagctgaaggtggacgtgttctctattcttgtatggtgggaggcgcgcgtcaaccaggactggttgaacaggatgaggatgctttggctgcactagcacgagaagaactgaaggcacttgcaggcgttacagctcgcccttcatttactcgagtgtttcgctggccacttggtattcctcaatacaatctcggacatcttgaacgagtggctgctattgatgcggcactacaacgtttgccgggccttcatctaattggaaatgcatacaagggtgttggactaaatgattgtattcgcaacgcagctcaactagcagacgcgctcgttgccggtaatacttctcatgcaccgtag

SEQ ID NO: 1033 - DNA, 1410 bp, synthetic construct
  source 1..1410: mol_type = other DNA
  misc_feature 1..1410: note = Gene encoding SEQ ID NO: 954
atgcaccacatgcagaggacacatcggatgaatgtcgccgtcgtgggaggtgggatttcggggttggccatcgcgcacggtttgcggtcgcgcggtacggctgccgtgctcctggagacatccgcacgtcttggaggcgcggtgggcacgcatgcgcgggctggctacctggtggagcagggccccaacagcttcctggaccgcgagcccgcgacgcgagaactcgcggcggcgctgaacctggaaggtcgaatccgggtcgccgacccttcagcgaagcgtcgctatgtctacacgcgaggccgacttcggtcggtgccggcttcgccgccggcgtttctggcttcggacattcttccgctgggcgcgcggctgcgggtcgccggcgagctgttctctcgccgcgcgccggaaggcacggacgaatcgctggccgcgttcggccgccgccacctgggccgcgcggcgacgcgggtgctgctggacgcggtgcagacgggcatctacgccggtgacgtggagcagctcagcgtcgaggccaccttcccgatgctggtgaagctggagcgcgagcaccgcagcctcatcctgggcgccatccgcgcgcagaaggcccaacgcaaggcgctgcccgcgggggacgcgccgaagctgtcaggcgcgctgagcacgttcgacggcggcctccaggtgctcatcgacgcgctggccgcatcgctgggtgacacagcgcacgtgagcgcgcgggtggaaggcctgacgcgcgtggatggcggatggaagctcgccgtcgaggaacatggacgccgcgcggagctgaccgcgaaccacgtggtgctggcggttcccgcgtttgtcgccgcgcagctgctgcgccccctggatgacgcgctggcggagcaggtgtcccgaatcgagtacgcgcccatcgcggtggtgcacctgggcttcgacgcgggcgcgcttccggcaccggacggcttcggcttcctggtgcccttcgaggagaagcggcggctcctgggcgccatccacgcgtccaccaccttccccttccgtgtcgagggcggccgcgtgctctacacctgcatggtgggcggcgcgcgtcagccggacctggtgaagcgggacgaagcagcgctcgcggcgctggcgctcgaggagctgcaggccctgacgggcgtgacggcccggcccaccttcacggaggtcttccgctggccgcggggcatcccccagtacaacgtggggcacctagcgcggatggcgggcatcgacgcggcgctccagcgctggcccgggctgcacctggcgggcaacgcctacaaaggcattggcctcaacgactgcatccgtaacgcggcgcggctcgcgactgccctcgcggacgaggaaagcgttcggaaatag

SEQ ID NO: 1034 - DNA, 1392 bp, synthetic construct
  source 1..1392: mol_type = other DNA
  misc_feature 1..1392: note = Gene encoding SEQ ID NO: 955
atgaatgtcgccgtcgtgggaggtgggatttcggggttggccgtcgcgcacggtttgcgttcgcgcggtacggctgccgtgctcctggagacatccgcacgtcttggcggcgcggtgggcacgcatgcgcgcgctggctacctggtggagcaggggccgaacagcttcctggaccgggagcccgcaacgcgcgccctggcggcggcgctgaacctggaaggccggattcgcgtcgcggacgcgtcggcgaagcgtcgctatgtctacacgcggggcagactccggtcggtgcccgcgtcaccgcccgcgttcctgacttcggacatcctgccgctgggcgcgcggctgcgcgtcatgggcgagctgttctccagccgcgcaccggagggcacggacgaatccctggccgcgttcggccgccgccacctgggccccgtggcgacgcgggtgttgttggacgcggtgcagacgggcatctacgccggggacgtggagcggctcagcgtcgaggccaccttccccctgctggtgaagctggagcgcgagcaccgcagcctcatcctgggcgcaatccacgcgcagaaggcccaggcgcgggccaaggccctgctgccccccggtgacgcgccgaagctgacgggcgcgctgagcaccttcgacggcggcctccaggtgctcatcgacgcgctggcctcgtccctgggagacgcggcgcacgtgggcgcgcgggtggaggggctgacgcgcgtggacgggggctggaggctcgccgtggaggagcacggacagcgcgcggagctgagcgcgtcccacgtggtgctggcggtgcccgcgcacgtcgccgccgagctgttgcagcccctggatgacgcgctggcggcgcaggtgtcccgcatcgaatacgcgcccatcgcggtggtgcacctgggcttcgacgcggggacgctcccggcgccggacggcttcggcttcctggtgcccttcgaggagcagcggcggctgctgggcgccatccacgcgtccaccaccttccccttccgcgtcgaaggcggccgcgtgctctacacctgcatggtgggcggcgcgcggcagccggacctggtgcagcgggatgaagcggagctcgcggcgctggcgctggaggagctgcgcgccctggcgggggtgacggcccggcccaccttcacccaggtgttccgctggccgcgcggcatcccccagtacaacgtgggccacctggagcgcatggccggcatcgacgcggcgctccagcgctggcccggcctgcacctggcggggaacgcgtacaagggcattggcctcaacgactgcatccgtaacgcggcgcggctcgcggcggccctttcggacgaggaaaacgttcggaaatag

SEQ ID NO: 1035 - DNA, 1410 bp, synthetic construct
  source 1..1410: mol_type = other DNA
  misc_feature 1..1410: note = Gene encoding SEQ ID NO: 956
atgcaccacatgccgaggacacacggaatgaatgtcgccgtcgtgggaggtgggatttcggggttggccgtcgcgcatcgtttgcgttcgcgcggtacggatgccgtgcttctggagacctccggccgtcttggaggcgcggtgggcacgcatgcgcgtgacggctacctggtggagcagggccccaacagcttcctggaccgcgagccggccacgcgggaactcgcggcggcattgaacctggaaggtcgaatccgggtggcggacccgttggcgaagcgtcgctatgtctacacgcgtgggcgactccggtcggtgccgtcctcgccgcccgcgtttctcgcatcggacattcttccgctgggcgcgcggctgcgtgtcgcgggtgaactgttctccggccgcgcccccacgggcatcgatgaatcactggccgagttcggccgccgtcaccttggacgcaccgccacgcaggtgctgctcgacgcggtgcagacgggcatctacgcgggcgacgtggagcagctcagcgtcgccgccacgttccccatgctggtggacctggagcgcaagcaccgcagcctcatcctgggcgccatccgcgcgcagcaggtccaacgccgggccctctccgcgggcggcacgccgaagctgagcggcgcgttgagcacgttcgacggtggactccaggtgctcatcgacgcgctggccacgtcgctgggggacgcggcgcacgtgggcgctcaggtggaatgcctgacgcgcgtggacggcgggtggaagttgatggtcgaggagcgcggccagcgcgcggagctgagcgcatcccaggtggtgctggcggtgcccgcgcatgtcgcggcggagctgctccggcccttggatgacgcgctcgcggcgcaggtggcgcgcatcgactatgcgcccatcgccgtggtgcacctgggcttcgacgcggggacgctgcccgcgccagacggcttcggcttcctggtgccctcgggcgaaaagcggcggctgctgggcgccatccatgcgtccaccaccttccccttccgcgtcgagggcgggcgcgtgctctacacgtgcatggtgggcggcgcgcggcagccggagctggtgcggcaggacgaagcggcgctcgcggccctggcgctcgaggagctgcgcgccctggcgggcgtgacggcgcagcccaccttcacgcaggtctaccgctggcagcgcggcatcccccagtacaacgtggggcacctggaacggatggccggcatcgacgcggcgcttcaacgctggcccgggctgcacctcgcgggaaacgcgtacaagggcattggcctcaacgactgcattcgcaacgcagcgcggctcgcggatgccctcacggacgaggaaagcgttcggaaatag

SEQ ID NO: 1036 - DNA, 1386 bp, synthetic construct
  source 1..1386: mol_type = other DNA
  misc_feature 1..1386: note = Gene encoding SEQ ID NO: 957
atgactgtcgccgtcgtaggaggtgggatttcaggtctggtcgtcgcctggcgattgcgctcccgcggtagggatgccgttctcctggagacaacctcccggctcggcggcgcggtgggcacgcgcgcgcagcggggcttcctcctggagacgggccccaacagcttcctggaccgcgagcccgccatgcgagagctggcatccgcgctcaatctggaacacaggattcgcgcggcggatggggcggcgaagcggcggtatgtctacacgcgggggaagctgcgctcggtgcccgcatcgccgccggcgttcctgaagtcggacatcctccccttcggcgcgaagctgcgggtgatgggggagctgttcagcggccgcgcggcgcccggcgtggacgaatccctggcggacttcgggcgtcggcacctgggggccacggcgacgcgggtgctgctggacgcggtgcagacgggcatcttcgcgggcgacgtggagaagctcagcgtgggcgccacgttcccgccgctcgtgaagctggagcgcgagcaccgcagcctcctgctcggcgccatccaggcccagaaggcccagaaggcgcgggcgaaggccctgcccgcgggcagcaccgcgccgaagctgagcggcgcgctgagcaccttcgagggcgggctcggcacgctcatcgacgccctgggcacggcgctcggggacgcggcgcgcacgggcgccacggtggagggcctgacgcggggagacgacggctggcggctcgcggtgagtgagcggggacagcgctcggagctgaaggcctcctccgtggtgctggccgcgcccgcatacgtgacgcggggcctgttggagccgctggacgcggagctggccgcgcgcgtgggcggcatcgactacgcgcccatcgccgtggtgcacctgggcttcgacgcggggacgacgcccgcgccggacggcttcggcttcctggtgccgccgatggagaagcgccggctgctcggcgccatccacgcgtccaccgtgttccccttccgcgtggaggcgggccgggtgctgtacacgtgcatggtgggcggcgcgacgcggccggacctcgtggcgctggacgaggccgaattggtggccctggcgcgcgaggagctgaaggcgctcgcgggcgtcaccgccacgccgacgctcaccgaggtcttccgctggaagcggggcatcccccagtacaacctgggccacctggagcggatggacggcgtggaccgggcgctcacgcgcctgccagggctgcacctggcggggaacgcctacaagggcgtgggcctcaacgactgcatccgcaacgggctggcgctcgcggacgcgctggtggacgcgggggcctga

SEQ ID NO: 1037 - DNA, 1386 bp, synthetic construct
  source 1..1386: mol_type = other DNA
  misc_feature 1..1386: note = Gene encoding SEQ ID NO: 958
atgactgtcgccgtcgtaggaggtgggatttcaggtctggtcgtcgcctggcgattgcgctcccgcggtagggatgccgttctcctggagacaacctcccggctcggcggcgcggtgggcacgcgcgcgcagcggggcttcctcctggagacgggccccaacagcttcctggaccgcgagcccgccatgcgagagctggcatccgcgctcaatctggaacacaggattcgcgcggcggatggggcggcgaagcggcggtatgtctacacgcgggggaagctgcgctcggtgcccgcatcgccgccggcgttcctgaagtcggacatcctccccttcggcgcgaagctgcgggtgatgggggagctgttcagcggccgcgcggcgcccggcgtggacgaatccctggcggacttcgggcgtcggcacctgggggccacggcaacgcgggtgctgctggacgcggtgcagacgggcatcttcgcgggcgacgtggagaagctcagcgtgggcgccacgttcccgccgctcgtgaagctggagcgcgagcaccgcagcctcctgctcggcgccatccaggcccagaaggcgcagaaggcacgggcgaaggccctgcccgcgggcagcaccgggccgaagctgagcggcgcgctgagcaccttcgagggcgggctcggcacgctcatcgacgccctgggcacggcgctcggggacgcggcgcgcacgggcgccacggtggagggcctgacgcggggagacgacggctggcggctcgcggtgagtgagcggggacagcgctcggagctgaaggcctcctccgtggtgctggccgcgcccgcatacgtgacgcggggcctgttggagccgctggacgcggagctggccgcgcgcgtgggcggcatcgactacgcgcccatcgccgtggtgcacctgggcttcgacgcggggacgacgcccgcgccggacggcttcggcttcctggtgccgccgatggagaagcgccggctgctcggcgccatccacgcgtccaccgtgttccccttccgcgtggaggcgggccgggtgctgtacacgtgcatggtgggcggcgcgacgcggccggacctcgtggcgctggacgaggccgaattggtggccctggcgcgcgaggagctgaaggcgctcgcgggcgtcaccgccacgccgacgctcaccgaggtcttccgctggaagcggggcatcccccagtacaacctgggccacctggagcggatggacggcgtggaccgggcgctcacgcgcctgccagggctgcacctggcggggaacgcctacaagggcgtgggcctcaacgactgcatccgcaacgggctggcgctcgcggacgcgctggtggacgcgggggcctga

SEQ ID NO: 1038 - DNA, 1380 bp, synthetic construct
  source 1..1380: mol_type = other DNA
  misc_feature 1..1380: note = Gene encoding SEQ ID NO: 959
atgactgtcgccgtcgtaggaggtgggatttcaggtctggtcgtcgcctggcgattgcgctcgcggggcaaggccgccgttgtcctggagacaacatcccggctcggcggcgcggtggggactcgcgcgaaacaaggtttcctccttgaaacaggtcccaacagcttcctggaccgtgagccggcgacacgcgagctggccggcgcgctgaatctggaacacaggattcgcgcggcggatgcggcggcgaagcggcgatatgtctacacgcgaggacagctgcgctcggtgcccgcatcgcccccggcgttcctgggctcggacatcctgccgtggagcgcgaagctgcgggtcatgggtgagctcttcaccggccgcgccgcgccgggcatcgatgagtcactggcggccttcggtcgcagacatctgggcgccaccgcgacacgcgtgctgctggacgcggtgcagacaggcatcttcgccggagacgtggagcgcttgagcgtgggcgccaccttcccgccgctggtgaagctggagcacgagcaccgcagcctcatcctcggcgccatccggacgcagcaggcccgacgaaaggccctgcccgcgggcgcgtccgccgcgcccgagctgagcggcgcgctcagcacgttcgagggcggcttgcagacgctcatcgacgcgctgagcgcttcgctgggggaggacgcgcgcgtgaacgcgacggtggaagggctgacgcgcgtgggggacgggtggcggctcgcggtgagcgagaagggacagcgctccgagctggatgcgtcccacgtggtgctggccgcgcccgcatacgtgacgcagaagctcttgcatccgctggacgcggagctggcggcgcgcgtgggcggcatcgagtacgcgcccatcgccgtggtgcagctgggcttcgacgtgggcacgacgcccgcaccggatggcttcgggttcctggtgcctccctcggagggacggcggctcttgggctccatccacgcctccaccgtgttccccttccgcgtggagccgggccgcgtgctgtacacgtgcatggtgggcggcgcgaagcggccggacctggtgggcttggatgagccggcgctggtggccctggcgcgcgaggagctgaaggcgctcgcgggggtgacggccacgccgtcgctcacggaggtcttccgttggcccctgggcatcccccagtacaacgtgggacatctggcgcggatggccgccgtcgaccaggcgctcacccgccggcctgggctctccctcacggggaacgcctacaagggcgtgggcctcaacgactgcatccgcaacgggctccagctcgcggatgcgctcgtcaccgcggcggggtga

SEQ ID NO: 1039 - DNA, 1377 bp, synthetic construct
  source 1..1377: mol_type = other DNA
  misc_feature 1..1377: note = Gene encoding SEQ ID NO: 960
atgactgttatcgctgttatcggcggaggaatcagcggactcacgctgacacattgcttacgttctcgcggcaaggatgcgcttctactggaagcgagttctcggctcggcggcaacatcgaaacgaggcaacgtgacgggttcctcatcgagacaggacccaacagcttcctcgatcgggagcccgcgacgcgcgagctggcagcgggcgtcggcgtggaagatcggatccgatctgcggatccggcggcgaaagcgcgctacctctacacgcgaggccgactgcgcccggtgccatcctctccgccagcgtttctgaaatcggacatcctcccgctgggagcgcgcctgagggtgatggcggagctcttcacgggccgggctcccgagggcgtggacgagtcgctggcagcctttgggcggcggcacctgggcccggcggcgacggcagtgctgctggacgcggtacagacgggcatctacgcggggaacatggagacgctgagcgtggacgccaccttcccgcagctgacgaagctggagcgcgagcaccgcagcctcattctcggagccatccgctcgcagaaggcgcagcgcaaggcgctccctgcgggggcagcgggaagcccggagaagctgcgcggcacgctgtgcaccttcgatgggggtctgcagacgctggtggatgggctggcacgggagctcgggcccgcggcgcacacgaacgcgaaggtggagggtctccagccgagccacggtggctggcgagtctccgtgcgagagaacgggggccaggccgagctgctggcatcccaggtggtgctggcaacgccagccttcgtggcggcggggctgatgcggccgctggacgagccgctcgcggcgctggtggagggcattgcctacgcgcccatcgccgtggtgcacctgggattcgcgccgggcagcacgcccgcgccggatggcttcggcttcctggtgccggggctggagaagcggcggctgctgggagccatccacgcctccacggtgttccccttccgcaccgagggcggacgcgtcctctacacctgcatggtgggtggagcgcggcagcccgacctggtgaagctggacgaggaggcgctggtggcgctcgcgcgcgaggagctcaaggagctggccggagtgacggcgagcccgagcttcacggaggtgatccgctggactcggggcattcctcagtacaacgtggggcacctggagcgggtggccgccattgacgcggcgctgaagcggtggccggggctgcacctgaccggcaacgcgtacaagggcgtgggcatcaacgactgcatccgcaacgccttcgcgctgggcgacgcgctggcggcctga

SEQ ID NO: 1040 - DNA, 27 bp, synthetic construct
  source 1..27: mol_type = other DNA
  misc_feature 1..27: note = Cy19 BglII_F primer
gaagatctatgagtgaggtagatgtcg

SEQ ID NO: 1041 - DNA, 28 bp, synthetic construct
  source 1..28: mol_type = other DNA
  misc_feature 1..28: note = Cy19 SalI_R primer
acgcgtcgacctagggctggcctcctga

SEQ ID NO: 1042 - DNA, 28 bp, synthetic construct
  source 1..28: mol_type = other DNA
  misc_feature 1..28: note = Cy20 BglII_F primer
gaagatctatgatggaggtagatgtcgc

SEQ ID NO: 1043 - DNA, 31 bp, synthetic construct
  source 1..31: mol_type = other DNA
  misc_feature 1..31: note = Cy20 SalI_R primer
acgcgtcgacttaacctcctgaaaggtaggc

SEQ ID NO: 1044 - DNA, 27 bp, synthetic construct
  source 1..27: mol_type = other DNA
  misc_feature 1..27: note = Cy18 BglII_F primer
ccagatctatgattgaggtagatgtcg

SEQ ID NO: 1045 - DNA, 26 bp, synthetic construct
  source 1..26: mol_type = other DNA
  misc_feature 1..26: note = Cy18 SalI_R primer
ccgtcgacctaggactggcctcctgc

SEQ ID NO: 1046 - DNA, 29 bp, synthetic construct
  source 1..29: mol_type = other DNA
  misc_feature 1..29: note = Cy19 XbaI_F primer
agtatctagaatgagtgaggtagatgtcg

SEQ ID NO: 1047 - DNA, 28 bp, synthetic construct
  source 1..28: mol_type = other DNA
  misc_feature 1..28: note = Cy19 XhoI_R primer
ttaactcgaggggctggcctcctgaaag

SEQ ID NO: 1048 - DNA, 28 bp, synthetic construct
  source 1..28: mol_type = other DNA
  misc_feature 1..28: note = Cy20 XbaI_F primer
gctctagaatgatggaggtagatgtcgc

SEQ ID NO: 1049 - DNA, 27 bp, synthetic construct
  source 1..27: mol_type = other DNA
  misc_feature 1..27: note = Cy20 XhoI_R primer
ccgctcgagacctcctgaaaggtaggc

SEQ ID NO: 1050 - DNA, 27 bp, synthetic construct
  source 1..27: mol_type = other DNA
  misc_feature 1..27: note = Cy18 XbaI_F primer
cctctagaatgattgaggtagatgtcg

SEQ ID NO: 1051 - DNA, 27 bp, synthetic construct
  source 1..27: mol_type = other DNA
  misc_feature 1..27: note = Cy18 XhoI_R primer
ccctcgagggactggcctcctgcaaga

SEQ ID NO: 1052 - DNA, 33 bp, synthetic construct
  source 1..33: mol_type = other DNA
  misc_feature 1..33: note = Cy19 R89A F
gatcgccacctgccggcgtacatctactggcgg

SEQ ID NO: 1053 - DNA, 33 bp, synthetic construct
  source 1..33: mol_type = other DNA
  misc_feature 1..33: note = Cy19 R89A R
ccgccagtagatgtacgccggcaggtggcgatc

SEQ ID NO: 1054 - DNA, 33 bp, synthetic construct
  source 1..33: mol_type = other DNA
  misc_feature 1..33: note = Cy19 V165C F
gtctctgggtgctatgcgggtgatccacaacaa

SEQ ID NO: 1055 - DNA, 33 bp, synthetic construct
  source 1..33: mol_type = other DNA
  misc_feature 1..33: note = Cy19 V165C R
acccgcatagcacccagagacaaagggcgccac

SEQ ID NO: 1056 - DNA, 33 bp, synthetic construct
  source 1..33: mol_type = other DNA
  misc_feature 1..33: note = Cy19 V165S F
ccctttgtctctgggagttatgcgggtgatcca

SEQ ID NO: 1057 - DNA, 33 bp, synthetic construct
  source 1..33: mol_type = other DNA
  misc_feature 1..33: note = Cy19 V165S R
tggatcacccgcataactcccagagacaaaggg

SEQ ID NO: 1058 - DNA, 30 bp, synthetic construct
  source 1..30: mol_type = other DNA
  misc_feature 1..30: note = Cy19 A167C F
gcgccctttgtctctggggtttattgcggt

SEQ ID NO: 1059 - DNA, 30 bp, synthetic construct
  source 1..30: mol_type = other DNA
  misc_feature 1..30: note = Cy19 A167C R
agcactcagttgttgtggatcaccgcaata

SEQ ID NO: 1060 - DNA, 33 bp, synthetic construct
  source 1..33: mol_type = other DNA
  misc_feature 1..33: note = Cy19 A167L F
gtctctggggtttatctgggtgatccacaacaa

SEQ ID NO: 1061 - DNA, 33 bp, synthetic construct
  source 1..33: mol_type = other DNA
  misc_feature 1..33: note = Cy19 A167L R
ttgttgtggatcacccagataaaccccagagac

SEQ ID NO: 1062 - DNA, 33 bp, synthetic construct
  source 1..33: mol_type = other DNA
  misc_feature 1..33: note = Cy19 A167I F
gtctctggggtttatatcggtgatccacaacaa

SEQ ID NO: 1063 - DNA, 33 bp, synthetic construct
  source 1..33: mol_type = other DNA
  misc_feature 1..33: note = Cy19 A167I R
ttgttgtggatcaccgatataaaccccagagac

SEQ ID NO: 1064 - DNA, 34 bp, synthetic construct
  source 1..34: mol_type = other DNA
  misc_feature 1..34: note = Cy19 V305L F
cattccctatcccaccctagcctgtgtggtcttg

SEQ ID NO: 1065 - DNA, 34 bp, synthetic construct
  source 1..34: mol_type = other DNA
  misc_feature 1..34: note = Cy19 V305L R
caagaccacacaggctagggtgggatagggaatg

SEQ ID NO: 1066 - DNA, 33 bp, synthetic construct
  source 1..33: mol_type = other DNA
  misc_feature 1..33: note = Cy19 V305M F
tatcccaccatggcctgtgtggtcttggcctat

SEQ ID NO: 1067 - DNA, 36 bp, synthetic construct
  source 1..36: mol_type = other DNA
  misc_feature 1..36: note = Cy19 V305M R
cacacaggccatggtgggatagggaatggtggccaa

SEQ ID NO: 1068 - DNA, 30 bp, synthetic construct
  source 1..30: mol_type = other DNA
  misc_feature 1..30: note = Cy19 L327T F
agtgtccgccccggctttggcgtaaccatt

SEQ ID NO: 1069 - DNA, 30 bp, synthetic construct
  source 1..30: mol_type = other DNA
  misc_feature 1..30: note = Cy19 L327T R
gcggatgccctgactgcgaggaatggttac

SEQ ID NO: 1070 - DNA, 32 bp, synthetic construct
  source 1..32: mol_type = other DNA
  misc_feature 1..32: note = Cy19 F360I F
caagtctttacgagtattattggcggtgctac

SEQ ID NO: 1071 - DNA, 32 bp, synthetic construct
  source 1..32: mol_type = other DNA
  misc_feature 1..32: note = Cy19 F360I R
gtagcaccgccaataatactcgtaaagacttg

SEQ ID NO: 1072 - DNA, 30 bp, synthetic construct
  source 1..30: mol_type = other DNA
  misc_feature 1..30: note = Cy19 F360L F
gtctttacgagtttaattggcggtgctacg

SEQ ID NO: 1073 - DNA, 30 bp, synthetic construct
  source 1..30: mol_type = other DNA
  misc_feature 1..30: note = Cy19 F360L R
cgtagcaccgccaattaaactcgtaaagac

SEQ ID NO: 1074 - DNA, 36 bp, synthetic construct
  source 1..36: mol_type = other DNA
  misc_feature 1..36: note = Cy19 F360M F
ggcaagtctttacgagtatgattggcggtgctacgg

SEQ ID NO: 1075 - DNA, 36 bp, synthetic construct
  source 1..36: mol_type = other DNA
  misc_feature 1..36: note = Cy19 F360M R
ccgtagcaccgccaatcatactcgtaaagacttgcc

SEQ ID NO: 1076 - DNA, 32 bp, synthetic construct
  source 1..32: mol_type = other DNA
  misc_feature 1..32: note = Cy19 F360V F
caagtctttacgagtgttattggcggtgctac

SEQ ID NO: 1077 - DNA, 32 bp, synthetic construct
  source 1..32: mol_type = other DNA
  misc_feature 1..32: note = Cy19 F360V R
gtagcaccgccaataacactcgtaaagacttg

SEQ ID NO: 1078 - DNA, 35 bp, synthetic construct
  source 1..35: mol_type = other DNA
  misc_feature 1..35: note = Cy19 F360T F
tttacgagtactattggcggtgctacggatcctga

SEQ ID NO: 1079 - DNA, 35 bp, synthetic construct
  source 1..35: mol_type = other DNA
  misc_feature 1..35: note = Cy19 F360T R
ccgccaatagtactcgtaaagacttgccaaccggc

SEQ ID NO: 1080 - DNA, 33 bp, synthetic construct
  source 1..33: mol_type = other DNA
  misc_feature 1..33: note = Cy19 I408R F
gtttggcgacgggcgagaccccaatatatggtg

SEQ ID NO: 1081 - DNA, 33 bp, synthetic construct
  source 1..33: mol_type = other DNA
  misc_feature 1..33: note = Cy19 I408R R
caccatatattggggtctcgcccgtcgccaaac

SEQ ID NO: 1082 - DNA, 32 bp, synthetic construct
  source 1..32: mol_type = other DNA
  misc_feature 1..32: note = Cy19 I408W F
aggtttggcgacgggcgtggccccaatatatg

SEQ ID NO: 1083 - DNA, 32 bp, synthetic construct
  source 1..32: mol_type = other DNA
  misc_feature 1..32: note = Cy19 I408W R
catatattggggccacgcccgtcgccaaacct

SEQ ID NO: 1084 - DNA, 41 bp, synthetic construct
  source 1..41: mol_type = other DNA
  misc_feature 1..41: note = Cy19 V165C+A167C F
cctttgtctctgggtgttattgcggtgatccacaacaactg

SEQ ID NO: 1085 - DNA, 41 bp, synthetic construct
  source 1..41: mol_type = other DNA
  misc_feature 1..41: note = Cy19 V165C+A167C R
cagttgttgtggatcaccgcaataacacccagagacaaagg

SEQ ID NO: 1086 - DNA, 42 bp, synthetic construct
  source 1..42: mol_type = other DNA
  misc_feature 1..42: note = Cy19 V165C+A167L F
ggcgccctttgtctctgggtgctacctgggtgatccacaaca

SEQ ID NO: 1087 - DNA, 42 bp, synthetic construct
  source 1..42: mol_type = other DNA
  misc_feature 1..42: note = Cy19 V165C+A167L R
tgttgtggatcacccaggtagcacccagagacaaagggcgcc

SEQ ID NO: 1088 - DNA, 44 bp, synthetic construct
  source 1..44: mol_type = other DNA
  misc_feature 1..44: note = Cy19 V165S+A167C F
ggcgccctttgtctctgggagctactgcggtgatccacaacaac

SEQ ID NO: 1089 - DNA, 44 bp, synthetic construct
  source 1..44: mol_type = other DNA
  misc_feature 1..44: note = Cy19 V165S+A167C R
gttgttgtggatcaccgcagtagctcccagagacaaagggcgcc

SEQ ID NO: 1090 - DNA, 39 bp, synthetic construct
  source 1..39: mol_type = other DNA
  misc_feature 1..39: note = Cy19 V165C+A167I F
ggcgccctttgtctctgggtgctacatcggtgatccaca

SEQ ID NO: 1091 - DNA, 39 bp, synthetic construct
  source 1..39: mol_type = other DNA
  misc_feature 1..39: note = Cy19 V165C+A167I R
tgtggatcaccgatgtagcacccagagacaaagggcgcc

SEQ ID NO: 1092 - DNA, 39 bp, synthetic construct
  source 1..39: mol_type = other DNA
  misc_feature 1..39: note = Cy19 V165S+A167I F
ggcgccctttgtctctgggagctacatcggtgatccaca

SEQ ID NO: 1093 - DNA, 39 bp, synthetic construct
  source 1..39: mol_type = other DNA
  misc_feature 1..39: note = Cy19 V165S+A167I R
tgtggatcaccgatgtagctcccagagacaaagggcgcc

SEQ ID NO: 1094 - DNA, 41 bp, synthetic construct
  source 1..41: mol_type = other DNA
  misc_feature 1..41: note = Cy19 V165S+A167L F
cctttgtctctgggtcttatctgggtgatccacaacaactg

SEQ ID NO: 1095 - DNA, 41 bp, synthetic construct
  source 1..41: mol_type = other DNA
  misc_feature 1..41: note = Cy19 V165S+A167L R
cagttgttgtggatcacccagataagacccagagacaaagg

SEQ ID NO: 1096 - DNA, 33 bp, synthetic construct
  source 1..33: mol_type = other DNA
  misc_feature 1..33: note = Cy20 R89A F
gatcgccacctaccggcgtacatctactggcgg

SEQ ID NO: 1097 - DNA, 33 bp, synthetic construct
  source 1..33: mol_type = other DNA
  misc_feature 1..33: note = Cy20 R89A R
ccgccagtagatgtacgccggtaggtggcgatc

SEQ ID NO: 1098 - DNA, 33 bp, synthetic construct
  source 1..33: mol_type = other DNA
  misc_feature 1..33: note = Cy20 V165C F
ccctttgtctctgggtgttacgccggtgatccg

SEQ ID NO: 1099 - DNA, 33 bp, synthetic construct
  source 1..33: mol_type = other DNA
  misc_feature 1..33: note = Cy20 V165C R
cggatcaccggcgtaacacccagagacaaaggg

SEQ ID NO: 1100 - DNA, 33 bp, synthetic construct
  source 1..33: mol_type = other DNA
  misc_feature 1..33: note = Cy20 V165S F
ccctttgtctctgggagttacgccggtgatccg

SEQ ID NO: 1101 - DNA, 33 bp, synthetic construct
  source 1..33: mol_type = other DNA
  misc_feature 1..33: note = Cy20 V165S R
cggatcaccggcgtaactcccagagacaaaggg

SEQ ID NO: 1102 - DNA, 33 bp, synthetic construct
  source 1..33: mol_type = other DNA
  misc_feature 1..33: note = Cy20 A167C F
gtctctggggtttactgtggtgatccgcaacaa

SEQ ID NO: 1103 - DNA, 33 bp, synthetic construct
  source 1..33: mol_type = other DNA
  misc_feature 1..33: note = Cy20 A167C R
ttgttgcggatcaccacagtaaaccccagagac

SEQ ID NO: 1104 - DNA, 33 bp, synthetic construct
  source 1..33: mol_type = other DNA
  misc_feature 1..33: note = Cy20 A167L F
gtctctggggtttacctcggtgatccgcaacaa

SEQ ID NO: 1105 - DNA, 33 bp, synthetic construct
  source 1..33: mol_type = other DNA
  misc_feature 1..33: note = Cy20 A167L R
ttgttgcggatcaccgaggtaaaccccagagac

SEQ ID NO: 1106 - DNA, 33 bp, synthetic construct
  source 1..33: mol_type = other DNA
  misc_feature 1..33: note = Cy20 A167I F
gtctctggggtttacattggtgatccgcaacaa

SEQ ID NO: 1107 - DNA, 33 bp, synthetic construct
  source 1..33: mol_type = other DNA
  misc_feature 1..33: note = Cy20 A167I R
ttgttgcggatcaccaatgtaaaccccagagac

SEQ ID NO: 1108 - DNA, 34 bp, synthetic construct
  source 1..34: mol_type = other DNA
  misc_feature 1..34: note = Cy20 V305L F
catcccctatcccaccctagcctgtgtggtcttg

SEQ ID NO: 1109 - DNA, 34 bp, synthetic construct
  source 1..34: mol_type = other DNA
  misc_feature 1..34: note = Cy20 V305L R
caagaccacacaggctagggtgggataggggatg

SEQ ID NO: 1110 - DNA, 33 bp, synthetic construct
  source 1..33: mol_type = other DNA
  misc_feature 1..33: note = Cy20 V305M F
atcccctatcccaccatggcctgtgtggtcttg

SEQ ID NO: 1111 - DNA, 33 bp, synthetic construct
  source 1..33: mol_type = other DNA
  misc_feature 1..33: note = Cy20 V305M R
caagaccacacaggccatggtgggataggggat

SEQ ID NO: 1112 - DNA, 33 bp, synthetic construct
  source 1..33: mol_type = other DNA
  misc_feature 1..33: note = Cy20 L327T F
cccggatttggcgtaacgattcctcgtggccag

SEQ ID NO: 1113 - DNA, 33 bp, synthetic construct
  source 1..33: mol_type = other DNA
  misc_feature 1..33: note = Cy20 L327T R
ctggccacgaggaatcgttacgccaaatccggg

SEQ ID NO: 1114 - DNA, 33 bp, synthetic construct
  source 1..33: mol_type = other DNA
  misc_feature 1..33: note = Cy20 I340T F
cgtacccttggcaccacatggtcgtcctgtctt

SEQ ID NO: 1115 - DNA, 33 bp, synthetic construct
  source 1..33: mol_type = other DNA
  misc_feature 1..33: note = Cy20 I340T R
aagacaggacgaccatgtggtgccaagggtacg

SEQ ID NO: 1116 - DNA, 33 bp, synthetic construct
  source 1..33: mol_type = other DNA
  misc_feature 1..33: note = Cy20 F360I F
caagtctttacaagtaccattggcggtgccacg

SEQ ID NO: 1117 - DNA, 33 bp, synthetic construct
  source 1..33: mol_type = other DNA
  misc_feature 1..33: note = Cy20 F360I R
cgtggcaccgccaatggtacttgtaaagacttg

SEQ ID NO: 1118 - DNA, 33 bp, synthetic construct
  source 1..33: mol_type = other DNA
  misc_feature 1..33: note = Cy20 F360L F
caagtctttacaagtctgattggcggtgccacg

SEQ ID NO: 1119 - DNA, 33 bp, synthetic construct
  source 1..33: mol_type = other DNA
  misc_feature 1..33: note = Cy20 F360L R
cgtggcaccgccaatcagacttgtaaagacttg

SEQ ID NO: 1120 - DNA, 33 bp, synthetic construct
  source 1..33: mol_type = other DNA
  misc_feature 1..33: note = Cy20 F360M F
caagtctttacaagtatgattggcggtgccacg

SEQ ID NO: 1121 - DNA, 33 bp, synthetic construct
  source 1..33: mol_type = other DNA
  misc_feature 1..33: note = Cy20 F360M R
cgtggcaccgccaatcatacttgtaaagacttg

SEQ ID NO: 1122 - DNA, 33 bp, synthetic construct
  source 1..33: mol_type = other DNA
  misc_feature 1..33: note = Cy20 F360V F
caagtctttacaagtgttattggcggtgccacg

SEQ ID NO: 1123 - DNA, 33 bp, synthetic construct
  source 1..33: mol_type = other DNA
  misc_feature 1..33: note = Cy20 F360V R
cgtggcaccgccaataacacttgtaaagacttg

SEQ ID NO: 1124 - DNA, 33 bp, synthetic construct
  source 1..33: mol_type = other DNA
  misc_feature 1..33: note = Cy20 I408R F
gtttggcgacgggcgaggccccaatatcttgtg

SEQ ID NO: 1125 - DNA, 33 bp, synthetic construct
  source 1..33: mol_type = other DNA
  misc_feature 1..33: note = Cy20 I408R R
cacaagatattggggcctcgcccgtcgccaaac

SEQ ID NO: 1126 - DNA, 33 bp, synthetic construct
  source 1..33: mol_type = other DNA
  misc_feature 1..33: note = Cy20 I408W F
gtttggcgacgggcgtggccccaatatcttgtg

SEQ ID NO: 1127 - DNA, 33 bp, synthetic construct
  source 1..33: mol_type = other DNA
  misc_feature 1..33: note = Cy20 I408W R
cacaagatattggggccacgcccgtcgccaaac

SEQ ID NO: 1128 - DNA, 39 bp, synthetic construct
  source 1..39: mol_type = other DNA
  misc_feature 1..39: note = Cy20 V165C+A167C F
ccctttgtctctgggtgttactgtggtgatccgcaacaa

SEQ ID NO: 1129 - DNA, 39 bp, synthetic construct
  source 1..39: mol_type = other DNA
  misc_feature 1..39: note = Cy20 V165C+A167C R
ttgttgcggatcaccacagtaacacccagagacaaaggg

SEQ ID NO: 1130 - DNA, 39 bp, synthetic construct
  source 1..39: mol_type = other DNA
  misc_feature 1..39: note = Cy20 V165C+A167I F
ccctttgtctctgggtgttacattggtgatccgcaacaa

SEQ ID NO: 1131 - DNA, 39 bp, synthetic construct
  source 1..39: mol_type = other DNA
  misc_feature 1..39: note = Cy20 V165C+A167I R
ttgttgcggatcaccaatgtaacacccagagacaaaggg

SEQ ID NO: 1132 - DNA, 39 bp, synthetic construct
  source 1..39: mol_type = other DNA
  misc_feature 1..39: note = Cy20 V165C+A167L F
ccctttgtctctgggtgttacctcggtgatccgcaacaa

SEQ ID NO: 1133 - DNA, 39 bp, synthetic construct
  source 1..39: mol_type = other DNA
  misc_feature 1..39: note = Cy20 V165C+A167L R
ttgttgcggatcaccgaggtaacacccagagacaaaggg

SEQ ID NO: 1134 - DNA, 39 bp, synthetic construct
  source 1..39: mol_type = other DNA
  misc_feature 1..39: note = Cy20 V165S+A167C F
ccctttgtctctgggagttactgtggtgatccgcaacaa

SEQ ID NO: 1135 - DNA, 39 bp, synthetic construct
  source 1..39: mol_type = other DNA
  misc_feature 1..39: note = Cy20 V165S+A167C R
ttgttgcggatcaccacagtaactcccagagacaaaggg

SEQ ID NO: 1136 - DNA, 39 bp, synthetic construct
  source 1..39: mol_type = other DNA
  misc_feature 1..39: note = Cy20 V165S+A167I F
ccctttgtctctgggagttacattggtgatccgcaacaa

SEQ ID NO: 1137 - DNA, 39 bp, synthetic construct
  source 1..39: mol_type = other DNA
  misc_feature 1..39: note = Cy20 V165S+A167I R
ttgttgcggatcaccaatgtaactcccagagacaaaggg

SEQ ID NO: 1138 - DNA, 39 bp, synthetic construct
  source 1..39: mol_type = other DNA
  misc_feature 1..39: note = Cy20 V165S+A167L F
ccctttgtctctgggagttacctcggtgatccgcaacaa

SEQ ID NO: 1139 - DNA, 39 bp, synthetic construct
  source 1..39: mol_type = other DNA
  misc_feature 1..39: note = Cy20 V165S+A167L R
ttgttgcggatcaccgaggtaactcccagagacaaaggg

SEQ ID NO: 1140 - DNA, 32 bp, synthetic construct
  source 1..32: mol_type = other DNA
  misc_feature 1..32: note = Cy18 R89A F
gatcgccacctaccggcatacatctactggcg

SEQ ID NO: 1141 - DNA, 32 bp, synthetic construct
  source 1..32: mol_type = other DNA
  misc_feature 1..32: note = Cy18 R89A R
cgccagtagatgtatgccggtaggtggcgatc

SEQ ID NO: 1142 - DNA, 31 bp, synthetic construct
  source 1..31: mol_type = other DNA
  misc_feature 1..31: note = Cy18 V165C F
ccctttgtctctgggtgttatgccggtgatc

SEQ ID NO: 1143 - DNA, 31 bp, synthetic construct
  source 1..31: mol_type = other DNA
  misc_feature 1..31: note = Cy18 V165C R
gatcaccggcataacacccagagacaaaggg

SEQ ID NO: 1144 - DNA, 31 bp, synthetic construct
  source 1..31: mol_type = other DNA
  misc_feature 1..31: note = Cy18 V165S F
ccctttgtctctgggagttatgccggtgatc

SEQ ID NO: 1145 - DNA, 31 bp, synthetic construct
  source 1..31: mol_type = other DNA
  misc_feature 1..31: note = Cy18 V165S R
gatcaccggcataactcccagagacaaaggg

SEQ ID NO: 1146 - DNA, 31 bp, synthetic construct
  source 1..31: mol_type = other DNA
  misc_feature 1..31: note = Cy18 A167C F
gtctctggggtttattgcggtgatccgcaac

SEQ ID NO: 1147 - DNA, 31 bp, synthetic construct
  source 1..31: mol_type = other DNA
  misc_feature 1..31: note = Cy18 A167C R
gttgcggatcaccgcaataaaccccagagac

SEQ ID NO: 1148 - DNA, 31 bp, synthetic construct
  source 1..31: mol_type = other DNA
  misc_feature 1..31: note = Cy18 A167L F
gtctctggggtttatctcggtgatccgcaac

SEQ ID NO: 1149 - DNA, 31 bp, synthetic construct
  source 1..31: mol_type = other DNA
  misc_feature 1..31: note = Cy18 A167L R
gttgcggatcaccgagataaaccccagagac

SEQ ID NO: 1150 - DNA, 31 bp, synthetic construct
  source 1..31: mol_type = other DNA
  misc_feature 1..31: note = Cy18 A167I F
gtctctggggtttatatcggtgatccgcaac

SEQ ID NO: 1151 - DNA, 31 bp, synthetic construct
  source 1..31: mol_type = other DNA
  misc_feature 1..31: note = Cy18 A167I R
gttgcggatcaccgatataaaccccagagac

SEQ ID NO: 1152 - DNA, 34 bp, synthetic construct
  source 1..34: mol_type = other DNA
  misc_feature 1..34: note = Cy18 V305L F
catcccctatcccaccctagcctgtgtggtgttg

SEQ ID NO: 1153 - DNA, 34 bp, synthetic construct
  source 1..34: mol_type = other DNA
  misc_feature 1..34: note = Cy18 V305L R
caacaccacacaggctagggtgggataggggatg

SEQ ID NO: 1154 - DNA, 34 bp, synthetic construct
  source 1..34: mol_type = other DNA
  misc_feature 1..34: note = Cy18 V305M F
catcccctatcccaccatggcctgtgtggtgttg

SEQ ID NO: 1155 - DNA, 34 bp, synthetic construct
  source 1..34: mol_type = other DNA
  misc_feature 1..34: note = Cy18 V305M R
caacaccacacaggccatggtgggataggggatg

SEQ ID NO: 1156 - DNA, 30 bp, synthetic construct
  source 1..30: mol_type = other DNA
  misc_feature 1..30: note = Cy18 L327T F
ccggatttggagtaacggttcctcgtggtc

SEQ ID NO: 1157 - DNA, 30 bp, synthetic construct
  source 1..30: mol_type = other DNA
  misc_feature 1..30: note = Cy18 L327T R
gaccacgaggaaccgttactccaaatccgg

SEQ ID NO: 1158 - DNA, 32 bp, synthetic construct
  source 1..32: mol_type = other DNA
  misc_feature 1..32: note = Cy18 F360I F
caagtcttcaccagtattattggcggtgctac

SEQ ID NO: 1159 - DNA, 32 bp, synthetic construct
  source 1..32: mol_type = other DNA
  misc_feature 1..32: note = Cy18 F360I R
gtagcaccgccaataatactggtgaagacttg

SEQ ID NO: 1160 - DNA, 29 bp, synthetic construct
  source 1..29: mol_type = other DNA
  misc_feature 1..29: note = Cy18 F360L F
gtcttcaccagtttgattggcggtgctac

SEQ ID NO: 1161 - DNA, 29 bp, synthetic construct
  source 1..29: mol_type = other DNA
  misc_feature 1..29: note = Cy18 F360L R
gtagcaccgccaatcaaactggtgaagac

SEQ ID NO: 1162 - DNA, 35 bp, synthetic construct
  source 1..35: mol_type = other DNA
  misc_feature 1..35: note = Cy18 F360M F
gcaagtcttcaccagtatgattggcggtgctacgg

SEQ ID NO: 1163 - DNA, 35 bp, synthetic construct
  source 1..35: mol_type = other DNA
  misc_feature 1..35: note = Cy18 F360M R
ccgtagcaccgccaatcatactggtgaagacttgc

SEQ ID NO: 1164 - DNA, 32 bp, synthetic construct
  source 1..32: mol_type = other DNA
  misc_feature 1..32: note = Cy18 F360V F
caagtcttcaccagtgttattggcggtgctac

SEQ ID NO: 1165 - DNA, 32 bp, synthetic construct
  source 1..32: mol_type = other DNA
  misc_feature 1..32: note = Cy18 F360V R
gtagcaccgccaataacactggtgaagacttg

SEQ ID NO: 1166 - DNA, 42 bp, synthetic construct
  source 1..42: mol_type = other DNA
  misc_feature 1..42: note = Cy18 V165C+A167L F
gccccctttgtctctgggtgctacctcggtgatccgcaacaa

SEQ ID NO: 1167 - DNA, 42 bp, synthetic construct
  source 1..42: mol_type = other DNA
  misc_feature 1..42: note = Cy18 V165C+A167L R
ttgttgcggatcaccgaggtagcacccagagacaaagggggc

SEQ ID NO: 1168 - DNA, 42 bp, synthetic construct
  source 1..42: mol_type = other DNA
  misc_feature 1..42: note = Cy18 V165S+A167C F
gccccctttgtctctgggagctactgcggtgatccgcaacaa

SEQ ID NO: 1169 - DNA, 42 bp, synthetic construct
  source 1..42: mol_type = other DNA
  misc_feature 1..42: note = Cy18 V165S+A167C R
ttgttgcggatcaccgcagtagctcccagagacaaagggggc

SEQ ID NO: 1170 - DNA, 37 bp, synthetic construct
  source 1..37: mol_type = other DNA
  misc_feature 1..37: note = Cy18 V165C+A167C F
ccccctttgtctctgggtgctattgcggtgatccgca

SEQ ID NO: 1171 - DNA, 37 bp, synthetic construct
  source 1..37: mol_type = other DNA
  misc_feature 1..37: note = Cy18 V165C+A167C R
tgcggatcaccgcaatagcacccagagacaaaggggg

SEQ ID NO: 1172 - DNA, 37 bp, synthetic construct
  source 1..37: mol_type = other DNA
  misc_feature 1..37: note = Cy18 V165C+A167I F
ccccctttgtctctgggtgctacatcggtgatccgca

SEQ ID NO: 1173 - DNA, 37 bp, synthetic construct
  source 1..37: mol_type = other DNA
  misc_feature 1..37: note = Cy18 V165C+A167I R
tgcggatcaccgatgtagcacccagagacaaaggggg

SEQ ID NO: 1174 - DNA, 37 bp, synthetic construct
  source 1..37: mol_type = other DNA
  misc_feature 1..37: note = Cy18 V165S+A167I F
ccccctttgtctctgggagctacatcggtgatccgca

SEQ ID NO: 1175 - DNA, 37 bp, synthetic construct
  source 1..37: mol_type = other DNA
  misc_feature 1..37: note = Cy18 V165S+A167I R
tgcggatcaccgatgtagctcccagagacaaaggggg

SEQ ID NO: 1176 - DNA, 42 bp, synthetic construct
  source 1..42: mol_type = other DNA
  misc_feature 1..42: note = Cy18 V165S+A167L F
gccccctttgtctctgggagctacctcggtgatccgcaacaa

SEQ ID NO: 1177 - DNA, 42 bp, synthetic construct
  source 1..42: mol_type = other DNA
  misc_feature 1..42: note = Cy18 V165S+A167L R
ttgttgcggatcaccgaggtagctcccagagacaaagggggc

SEQ ID NO: 1178 - DNA, 27 bp, synthetic construct
  source 1..27: mol_type = other DNA
  misc_feature 1..27: note = CyPPO19_XhoI_F
ctcgagatgtctgaggtggacgttgcc

SEQ ID NO: 1179 - DNA, 27 bp, synthetic construct
  source 1..27: mol_type = other DNA
  misc_feature 1..27: note = CyPPO19_BamHI_R
ggatccaggttggcccccggaaagata

SEQ ID NO: 1180 - DNA, 27 bp, synthetic construct
  source 1..27: mol_type = other DNA
  misc_feature 1..27: note = CyPPO18_XhoI_F
ctcgagatgattgaagtggatgtggct

SEQ ID NO: 1181 - DNA, 24 bp, synthetic construct
  source 1..24: mol_type = other DNA
  misc_feature 1..24: note = CyPPO18_BamHI_R
ggatcctgattgtccaccagcgag

SEQ ID NO: 1182 - DNA, 1614 bp, synthetic construct
  source 1..1614: mol_type = other DNA
  misc_feature 1..1614: note = Gene encoding AtPPO1 of Arabidopsis thaliana
atggagttatctcttctccgtccgacgactcaatcgcttcttccgtcgttttcgaagcccaatctccgattaaatgtttataagcctcttagactccgttgttcagtggccggtggaccaaccgtcggatcttcaaaaatcgaaggcggaggaggcaccaccatcacgacggattgtgtgattgtcggcggaggtattagtggtctttgcatcgctcaggcgcttgctactaagcatcctgatgctgctccgaatttaattgtgaccgaggctaaggatcgtgttggaggcaacattatcactcgtgaagagaatggttttctctgggaagaaggtcccaatagttttcaaccgtctgatcctatgctcactatggtggtagatagtggtttgaaggatgatttggtgttgggagatcctactgcgccaaggtttgtgttgtggaatgggaaattgaggccggttccatcgaagctaacagacttaccgttctttgatttgatgagtattggtgggaagattagagctggttttggtgcacttggcattcgaccgtcacctccaggtcgtgaagaatctgtggaggagtttgtacggcgtaacctcggtgatgaggtttttgagcgcctgattgaaccgttttgttcaggtgtttatgctggtgatccttcaaaactgagcatgaaagcagcgtttgggaaggtttggaaactagagcaaaatggtggaagcataataggtggtacttttaaggcaattcaggagaggaaaaacgctcccaaggcagaacgagacccgcgcctgccaaaaccacagggccaaacagttggttctttcaggaagggacttcgaatgttgccagaagcaatatctgcaagattaggtagcaaagttaagttgtcttggaagctctcaggtatcactaagctggagagcggaggatacaacttaacatatgagactccagatggtttagtttccgtgcagagcaaaagtgttgtaatgacggtgccatctcatgttgcaagtggtctcttgcgccctctttctgaatctgctgcaaatgcactctcaaaactatattacccaccagttgcagcagtatctatctcgtacccgaaagaagcaatccgaacagaatgtttgatagatggtgaactaaagggttttgggcaattgcatccacgcacgcaaggagttgaaacattaggaactatctacagctcctcactctttccaaatcgcgcaccgcccggaagaattttgctgttgaactacattggcgggtctacaaacaccggaattctgtccaagtctgaaggtgagttagtggaagcagttgacagagatttgaggaaaatgctaattaagcctaattcgaccgatccacttaaattaggagttagggtatggcctcaagccattcctcagtttctagttggtcactttgatatccttgacacggctaaatcatctctaacgtcttcgggctacgaagggctatttttgggtggcaattacgtcgctggtgtagccttaggccggtgtgtagaaggcgcatatgaaaccgcgattgaggtcaacaacttcatgtcacggtacgcttacaagtaa

SEQ ID NO: 1183 - DNA, 155 bp, synthetic construct
  source 1..155: mol_type = other DNA
  misc_feature 1..155: note = Gene encoding Transit Peptide of AtPPO1
atggagttattcttctccgtccgacgactcaatcgcttcttccgtcgttttcgaagcccaatctccgattaaatgtttataagcctcttagactccgttgttcagtggccggtggaccaaccgtcggatcttcaaaaatcgaaggcggaggaggc
